United States Patent Application Publication US 2007/0031842 A1 - sequence listing, part 2

SEQ ID NO: 1235 - DNA, 31169 bp, Homo sapiens
  misc_feature (4244)..(4244): n equals a,t,g, or c
gccgcggcgagagcgcgcccagccccgccgcgatgcccgcgcgcccaggacgcctcctcccgctgctggcccggccggcggccctgactgcgctgctgctgctgctgctgggccatggcggcggcgggcgctggggcgcccgggcccaggaggcggcggcggcggcggcggacgggccccccgcggcagacggcgaggacggacaggacccgcacagcaagcacctgtacacggccgacatgttcacgcacgggatccagagcgccgcgcacttcgtcatgttcttcgcgccctggtaacgccgcgcaggccggcgccctgccccgcacttggcgcttcgcggggcgtggggcgcttgggcgccgcgggcggggggtcccggggccacgtggacgccgacggctctggtctgcggcgtgcgtgctacgggcgcggggctcggggctcaggggtgcggggtgtaatactgggggcgcggggccgggagcgcggggactctgcgggttcggggctccggctggcggggagcggggggcgcgggcgccgcggctcggggccgggagccggggactgcaggggaccgagggcttggggctccgggtcggggggcgtgagctcagcgggccgggcactggcggctgacgtggcgctcggcggccggggcggtgcgggaggagggggcggaccccgaggggacagccgggaaaagcccgccctgcgccgcgctcctgaattcaaccgcctcttgcacctcggcaccgagggaggggaaggtggggtcgtcgccctttcgggcagccgggagtccaaatgtcaccccgcggtccctgcccagcgccccaaacttcctgtgccggccggacgcgcggcctgcccgtgggccacgtgcactcaccagagcggccttgctgctgccgcggccaccggggtcggctgggacagactgcgggcacgtccccttccagaggctttaactgaaaaatagaacccaggaaggtgtggtttcccactttgtgcgtcttttgtgggataggaaggagtggtccgggcagaggagggttgctgagctaccccgggaagaccaaggtagtgcgaattctggaacccctccgcccccctgcagctcagggtggatgtaatctctgaacggagcccactggtcctcaactccaggctgtcctgtcacctccctgctgctctctcgggtccaggtcacttgttatgtgtgagatcggaaaagcccctccgttgagcagatggtccctcttgctttggttctctgggcgaggctttggtgtgggcctcgctgctgacctgagagaccctaccctggcactcatcccacggaagagcttcctgtcattcacacaagcatgtgcacagctttcctgccagtgccgggatgccccgaggaagggaagtgaccacaggccagagcagaaagccataattttaggacacaagacctttgagaggttggaatagcctgcaggttcttgttgcagaacttggtattcttccccagagctcagtagaggctcacttgggaaagggatgtagggaggcatagagaaaaggtaccctaagaaaaatggccagttcagaaattgtacctttcaaactgggagaaacgtttttctcttaaccttgtattcaggctattactgcgtttcagttcatttggagttaaatcaactttttgggccagtgtgggtttattaacaatgtgtatatgaagtacattatgtttcacattcctaagaaccaactgactcgaatttttacaactccaatggtttagaaattactttgtaacataaaacaatcaggcagtattaacagtttctctttgttcgggagtattctcagcaactatttcaattaagtgtactacttaattggagcctatttcagtggaatacatctgtcgatgggttttcttttttctttcttcattatttatttattttagagatgggatcttgctctgttacccagcctgaaaccagtggtacgcagccgcagctcactgtagcctctaactcctgggctcaagtgattctcctgcctcagcctctgaagtagctgtgactacaggcgcaggtcatcacacccagcttattttgttgttgttgtttttgttgtagttggtagaaacagggtctcgctatgttgccggggctggtctcaaactcctggcctcaatcagtacttctgccctggcctcccaaagtactgagattacaggcatgagccatcgcatcccattctttacttttttttttttttaaagaaaaactgacatgcagatgtaataagtccccacagtgccaaaggaattttaagtttagaatctttgcaataaataccagctagtcctgggctgagtgagagaaaactggcacatctgggcacttggtattaagtaaattccttttccattatatgtggcttgtagacatttagctggatgcttccagaataattagctttatgttgttacttttttttttttttttttttttgagatggagtcttgctctgttgccaggctggagtgcagtagcgcgatcttgatttactgcaacctccacctcctgggtttaagcgattctcctgcctcagcctcctgagaagctgggactacaggtgcgtgccaccacgcccagctaatttttgtatttttagtagagatggggtttcaccatgttggccaggattgtctcgatctcttgacctcgtgttctgcccgcctcttcctcccaaagtgctgggattacaggcgtaagccaccgcacctggcatatttgttgacttcttgatagtctactacaaatacttaaacagagatatgtgggtttctatgatggtgtttaagttggacttttaagagggccctttcagaaaactgcagatactgcagtagggctcaggaataggctgccaggaaaggaggctgagtgggcggcgagtcaaatgggaggtcagcaggggcaagatcaagtaggaccaacaatacctggcacaacactttggtaagttgtaaggctgagagcaaggtggtgactctggaggggtctatgcaggagagggaaggaggtcctggagtggtgagctgagcgtttggagctcagatagaagactcagtggactccccctcaacacacacatacctttttccagtttcagctgccgtggagtggtgaaagcccacgtgtgattaaggggctggggcccctgtaacaaaaacatcaatctgtgtatttttgccctgcacttggcttctgcagggttatcctgctgctgtagattttttgccaacatcaggtcacaacttctgtatggccagtttgtgagtcacccttgacctggtgacagtgaggtcaagatttggaccaggtagctttgctctacttcttggccacaggctaccttctgagtgcagctgcctgtctcagagttgggtgctgtagccgcagggccgactagatagcacctgtggccccatcacagccaggagcaagggcacgcccaacttggtgatggcccagaatggtcagttttgatttagcgcaccacaaacttatttattgtttattctcattcttaatctaatcttgtgttttctcaaaaaaaaaaaagggaaaaaaaaagcagtagcaaaacaaaaccttgtcaagattgcagaggagttctaaagttccagaatgagcatatctgatcaaagtcccctgaaggtcagaactgcccttgacagtcccttaggaaggtgccttgttggacaccgccccagtcagtcagtcagtccccactgccagcgtttcctccagcattagaactatcatggcttctttggttaaacaccaaatggactagttctcaaacctgtgcctttagacaacagggtcacacttaatgtagtcggagagatgctcatgccatgagaagcatgtaggaaccaaggcctgctgaggaacaaaaacctcacatctcccagcttgcacacacttcagggttctgtgggaattgcctttttttttttcttgtttccttctcccccgccacataaactcactttgttgaatctacagaagttaaatctgcatgtatagtttcattgtgcttttttttttgtatctgagtatctcataaagcagggattctcttagctggccaagaaagtgctgtttagggaagacacattaacttgaagcagactttttcagtgctacctttaagtctgngtttttttttttttttttttttttttttgaaatggagtcttgctctatcgcccaggctggagtggcaatagcatggtctgggttcactgcaacctccgcctcccgggttcaagcgattttcctgcctcagcctcctgagtagctgaaatacagggcgtgtgccaccatgccccagctaatttttgtatttttagtagagatggggcttcaccttgttggtcaggctggtctcgaactcctgaccttgtgatccgcttgcttcggcttcccaaagtgctgggattataggtgtgagccaccacacccggcttaaatcctttttttcttaagagacaaaatctctgtcacccaggctggagtgcagtggtgtgatcatagctcgctgcagcctcaaacttctggcctcaagtgatccctctgcctcagcctcccaggtagctaggactgcaggtgtgtgccaccacaccaggctaattttttaaaattttttgtagatgggggtctcactgtgttgcccaggccagtcttgaacccctgggctcaagcagctctcctgccttggcctcccaaagtgctgggattacaggcatgagccactgctaccgacttaaatgcttatttttgaggtaatctgtcagaaaataaaaggagatttaacagattattaaattattttgaggaagaagtcacaattctaagcgttgagtgttcatataagcaagtgtgtttaaaaaaaaagcattttaaaaagcgatacagcaaagtggttacattgtaggcatcagtgtgttcctgccatattaaatagcaaacaaacccatgtgtcataatgctatgggattgtagttgaaacctgggataaagtttctagggttgtctcattcaaaattcgagtatggcactgtagacatactgtccagagaacacagcaagagctgtggtcagctgtatgacttaaggtctagtgttgggaaagatgctgatatcctcatgaaatgtgaagcatggcaagaagcctaattaagatactattttaaatgatgggtgattttaaaatatttatacataactgaattcatacaatgaatactaagaatagacatttgcttacttcaaccctagaagtataggtggccacaaactttttttttccccttctcattggagaaaattgcaggtgattaaattttgagattgccttatgtttgtagccatttggttatatagtggaggagacttgacgaataaaagtagcagatacagcaggaagtgctaagctactgtccaagggaggagtagagaggctttccagaagggcaggagaagagaatgggtgctgaacagcccggggagtcagggccaacttgctagaggaagtgacacccaaactaaacctgaagggcagatagatttagctaggtggagtttagggacgaagtgtcagagagaatgtgtcccagggccaagccaagctatagtcctttgggaacactgcagatgctgcagtagggctcaggagtaggccacaagggaaggagggtggactctgggatagaagtcaagcgggaggtcagcagggccagaacaactaggatccagaacaacactttgctaagtttaatactggaacaaggccaagatttcatgctgagaacagggcagtgactctggagggatgggagcaggggagagaggtcctggagtactggtccaggagctgccatctgcaatggtgtaaagaaaggactgagagccccattgtcccctggacagagctgaagttgtgggccagctgccctgtgacctgatactcaatgtgcttgtactcttgccttgttccaggtgtggacactgccagcggctgcagccgacttggaatgacctgggagacaaatacaacagcatggaagatgccaaagtctatgtggctaaagtggactgcacggcccactccgacgtgtgctccgcccagggggtgcgaggataccccacgtaagttggaaggaagggggcacacttcctaggtggctcctggctacaaagaaagtcctagttaaacttttggtaaaggtgtgaagagatactaaatttaagcaggcagtccctgtcattagggagaaactgcatttaatgctgtgtctgttttagatggcttttatacttggataacctttaattcatcagtgttgggttttcctgtttataagagaatgtgtttgcaagagaaaaatgacggtcccgccatgctagatgttcaccggtacattttacacagtgtgcatggactgtcatcagttttggcttgcttttgctggtgacttattcgcaaacacccttcctatagttccttcccgtgtgactcccacagggctgttcctgttggaaagaaagtatagagtctgacagacgatgatacttacttccttgacagttaagaatttttttggttataagaaatagaaattgaaatgttctcaattctagaaatagaattgttctcttattaaacagaaagaaaggactatttaaaaggctgtggaggaacctctgagagccagctccaggggcctggggtctgtttctcctgcacctcccttgagatgacggctttccaggcctgtatctctgtttgcacagaagggcccaccactgactggccctgcttggctggaatgttcgttccaggaatagtcactgtggccagggaaacaggagcttatagcaagacacatgcccattcacaccatgtgccaagtgttggagggaaaagcagttcttcaaaaaagagaagaagctgtttctgaaggaggtggagggattgccacggtcacttccttgctgtttgtttcaattgaggaatgaagtcaattctatacaatttattgcttaattgaataatataggggtccatcaataaagcaaaaaattggagcttatattcaaacctgggaggcagaaaagtggagggatctccaggcttgaacctagaagtcgtagtcaaatcccagctctaccatttacttaccacccagctctgacctcatcacttaacctgtaagtaaggtgatcccccaaacattgttacaggacttacatggaatgtgtgcagacaccaatctgagcacacccaatacatgttagggttttccctaccatttggaaatgtgggtgtttccacaaaggaccctggaattcttggtctttggtgactgcttgctaatgtaagtgccataatttgggtttactttaaatcagatcaatggagataaaattgcttatctgtatctacgtaaaagcattaactattctatgctttatagtattgcattgaaagtatggatcaagagcatcccaaagaagcaggtagtgagcagagatgagggcgaggaggtgaatgcttacctgttgagagactgttgctttcaaagttcaggggcagcaggggtgagctggctgtggtgtctttcctcttaacctgctgaccatctgtggcctgagactatgtgcatcacacaccatgccacagggaaggtgacacaggacctgtaatggagctgagagtggtatgtgttatggggcttcagagaaggaagtgaaggcttccacctcagcctggccataacagctgtcagctgcaatatcagctactccatagttggtattcaccaaaaaccatcacagatttaaaaagtcacaaatgtaaaaagtcacaaatttaaaaaggcccatgttggatcatgtgtttagatttttaatgagaagagctggtctccccaagtaaaccatggctggttttgtgttattaaaaagaacaaaaatgaacgtacaccacactgaacacagtttgggaaggaacctctgtgaccatcactgccctgcagaagctccaagaacagattattttccccccgagaatgcaggaggtggaatgtgctgtgtgcaatgtggtcgcactggggcatctgtagattgacttgagcgagctttgactcctctaagacaagtgcccatcccatagagtggttgtgaggcccgaggcaggtgacgactgtacctgcctgagtccaggcatgtgtcaggacatgagctttcacgttattctttcctggcaagtgtaactggagtaaaggattggaggggcagggagtttgggctcccacgctccctagagatggctggctgtgctcaggaaaatgttttgaggtcttcctgttgggccagtcatgaatcattacagcagggcaggactgacggggggaactacctgtgttagtttcctaggctgctgtaacaaagttccacaaaccgggtggccagaaacaatagaaatgtattctctgcagtcctggaggccagaggtcctaaatcaaggagccagcagggtcatgctccctctgaaacctgtaggggaatcctcccttgcctcgtcctggctcctgttggtttcctggtcatctttggcgttccttggcttgtagatgcatcactgccgtcctctgtcctcacatgcccttctctctctgtgtgtgtgtgtctctctgtgtccaaacccttcttacaaggacaccagtcatgctagattggggcccatcctagtgacctcattttaacttgaatatatctgtaaagaccttattctaaataaggtcaccttctgagattgatggttatgacttacacagatctgtcttgcaggacacagttcaactgataacactgtctacggtagtagaactttcatcatgctgtttgccaaggcagtacctacatggggattttctccctgcagtctccttgaaaaaggagactcaaatgcccatgtggaggcttggtaatagcggaaatctggggcaatactttgtttgggcttgtaccctgtggcccagtctccatcacctccctcacccctgtcgacagtgagaattgaagtcagatgtcccaaactcactgcaaggtctggaccagaagtgtccgctctgtccctgggctctgtgaacttaccgaggaagaatctcagacttcctgggcaggttagaacgattatcagtccaacaacaagaagatggttttttttaaattatttgttttgcaaatgaatagcaaattacaaaaaaatcataggctaggtcttactgtattttacttttagcaaagacacaagtgtgaccgtccctggtcctttctgatgtcttgaggatccacccatttcccttcctgaagagcgttagcgggaggcagagccgtgcaggaagcagtttctgtttccaggtgcggaacacaccttgtgggagcctggggaggtgccaggctaggtgagggcaatcatctttgataccgcagatgttgcagttgcttatcatgttgaacttcgtgacgtagccggtgtactggccaaatctagttaagttttggctgttttttgtggttatgagagtctgagctgctgaggaagctgggtgtatattctgcactggagacacattagggaccctacctatgccccatcataccatcttaggttctgggtaaggccagtatgctgatactaatttcaaagcctaatctagccatgtgacttcattttaaggagaattagccatttttttttggactgaatgtgtgtgtaccccagcattcataggggaaatcctaatccccaatgctggcaataggaggtggggcctttgagagggagcaggttattagggtggagctctcatgaatagggttgcataccttatgaaagaggccccagagagttctgtttccccttttgccatgtgagggcacagcaagaagacaccatctgtgaaccagaaagccctcaccagacactgactctgctggcaccttgatctcagacttcccagtctctagagctaggcgaaatagattctgttgtttctaagacacccaatctgtggtcttctgttacagccgttgaactaagacactattcaaaccttcatgtcagattttacatatgttgccgtcttacaattctgataccgtacattgggcatttactcacaaaatccacatacgcgctgtagaagtggcaggggtgtttagatgagcaggcttgccaacaaatggtactctgtatttcttttttcttctattggtagtcacatttttgcctatccttgacaccttctatgaatttttatctagagtattagagcacgttttcccgtgactgctggagggatacaggaactgagtgttaatttcatcctctggtgatgtcttttgcttatggttaaaggacctactcccgtatcctctctgcagattccttcagaggccagcatttgtaggaaaaagaaaagattccttctctatgggaaggtgaatggacagcatcagtcaatgtcaaggatgttcttatagctggaaacttgaattctcacagtaactggatattcaggccttgtaagagttgaatacctgccaggtggcctggaagaataccttaattgcaaaacaacaccgtgtctgctccagtcctaatttgaacacagacacaacaactgctgaagccgggaaagcataacagtagcttgcagggaaggcccgaggctgctgcagaggagcactgagtactgtagcttttgaggcctcagtcacagcagcgggctggaagttttcacctcattttagttttccttgaataaaaccagaaacttctgaaagtttaggattaactgaatgtattatctcctggaacgttatgtttgtttcctttttatcagagaggagcagatacgtgcctggctgcagccccttgacagctcattttctgattgtttcactaaatgagtttgctctctgataagacaactttctttttgctctgtctaatcctttgttattctttcagcttaaagcttttcaagccaggccaagaagctgtgaagtaccagggtcctcgggacttccagacactggaaaactggatgctgcagacactgaacgaggagccagtggtgagtgtctacctccttccctccctccctccctccctccctctctccctgcctacatctttggggtaatatgtaacggggcagaggccagttgaggttaatgattaaggctgccattttaaagcaactctactttttttggagcttattgatattataggtaaagatgaacttttacagaaactttttggtgtggaaatacctaaatgtgcacaaaagtcaagagaaggctaaaccctcagtttcagcagttaccaccattttggtgtttgtcttccccgccaccctgcgccttgtttggctgtagtcagtcttcagggaagtcacttgtgtggcctcacagataagcacttactctttgttaacactgccaccctgccactgtcacaggtaatacagttcacaactgtaccctagcatcagagactgactctggaccacctggggtcagggctgggcccagcctagaatctcctatccaagccagcactggagcctcctcccatccccccgacctttgccctccaccacctgcagccctctggctcgggcctagcccgacagctgtacccgtagggtggatccttccttttcttctcggtgctcagtccccgagtctctaatgggctttgcttataacatcattttgtaccattaatactctgtgtcttaatgcacttcccttactaaggctaatatcaggagattgtagactcttagaatattatgtactaaaaaggatttataatcctccccctccccagttgatgttggaagtcttcacttttttataaatcatgatcataaaccactggttaagtgttcctttgtgggtggtgccttctgattaatgccgagtgctcaggtccctggatgccgggtagacctggtgggtcatgctgctgtgttggagagggactggaaaaacacccgtgttcctacactgtaggatcctgatgagctaggaagagcatctgaagtctttgtaatttcaatttcaacaaatacctaagactaccttcttgtatcagctaagcgcccactgatttgaaggtggtctgtggtggtccttttggagctttgccgcttactgttgccagtttccagtgtgtctgtgcggctcttccgctctgccccatcttctctgatgacctaatcagaaacttggctgctgattcagtgcttccatccctcacctgcaaagactctctcaactcggctgggtgtggtggctcatgcctgtaatcctagcactttgggaggctgaggcgggtggttcacccaaggtcaagagttcaagaccagcctggccaacatggtgaaacgtcgtctctgctaaaaatacaaaaattagccaggtggtaggtgcctgtaatcccagctacttgggaggctgaggcaggagaatcacttgaacccaggaggcagaggttgcagtgaggcgagatcatgccactgcactccagcctatgcaacagagcaaaaactatcgtggaaaaaaaaaaaaaactctctgaactgtatggtggagactgttggtgtgtgatgttatgtcgttgaaccagagacttacctaactttagctaaaagaaccacagacctctcaggaaatttgcatctttgtcctggcaagaaagctgaatgagcaggtgtgactttcatagttttcaattggacattgtttcctttgtgaaaatattctctttgtggggacacatatattggatggtagcaaaccaattttaaggaggagttaatagcctcaaataaatttcaccaaaaaagccagtcttctatgatggctttattcaagaaaccagcagccagtatcaggacggcagaaagacctcatctcatggcccatttcccttagtggaggtggcggcctcacctgcaggttggaaagggctgagaggctgcgtccaggctctgcaagggactttctgtctcctcagtgtgggagcaggatggccgcgtgtaatccccccatgccaccccagaaccacagtcaccaacttgccatattttagtgtctccagcaatagcaggccccagataattgccagaaacaatgacaatgcgccttattgtggaaaagtttaagtatatacactttatactgcaaaccagaattctcttagctttttaagtgaaaactttaaaaaaagttctttatctgtatacctaagtaacttagtacatacattttttaatattcacgtgggataaatttagatttttttaagtgttgtggcaatattcaagaaactcaaaagacaatttgtcactttgtacattctactgcaatttttgtatttccatgtttgcttctgtattttttcttgaacagttatacaaacatgtttcatctcattaatgattttatatatttatgtggtctttatattgatcatgtcttatattattttatcatgtggatttgccataattcaactctaattctgtcagtggatatttaggttatttataccttttccatcatcagtaatgatgtagggaacaagtttatctttgtaaaggactttccacccccccttcttttgagtgatatttttagaatatagtattcccagacataaaattataaggccaagaataaaaaaaaagatcatttttatggctcttgatgaatatagccaggtttcttaagcaccatatcagcttatgctgccactgtagggcaagacgtgacctgtttctgggatgcactgtggtgttcccgtgccgggggactgctctggagtctgccaggaacccaggaagcaactagaggccccgcatgtgccataaatgaacacttcatactgaaaggcccttgaacatctcatggagagtggcacacggtattttatttcaccttatgtgcacccattgactgttcacttagccattcttcccttgggcattgttttgtgtgggtatttagcactttgaaagtcttgacgcgctggcagcagaagggaaactttgtggttctttatgattccagccctgcacagctttgaactgtcagcacctttaaagcctttaacaacttagcttggatattctttttaataggaatatgaacccccagataaaagctgagtaatatacacttaatgtgtctgcagcagaacactgattccattatctttccctcatttctggttactttggttggaagccacagctgtacctggtctgaaaagttgagaaatgtaggattgtgactagacagctgcacacattgctgtctgcttgggtcctggcagaagcatcttttgaaaagcccctttccccctctttctgtacgagacttagtcatatgaattacattctttcttgaaggtgcagcttatgttcatgccatggttttctctctgttgcctttcattcacctgcattttccttctcatcacctccttttctctctgatcagtcttccacagttgtgtcttcctcacagttttccctgtcatttgtgtaaagtaaggataaccaggccttcctggtccctgagtttctcattctcagctttgtccattttgctaccctcgtgtctgtttgtgtgttttttgaggaagagtctcactctgttgcccaggcaggagtgcagtggcatgttctcagctcactgcagcctccaccccctgggatcaagtgatcctcccacctcagcctcccaagtagctgggaccacaggcgcacgtcaccatgctcaggtaaataaaattttttttttgtagcgatggggtctcactctgttgcctaggctggtcttgaactgctgggctcaagcagtcctcttgcctcagcctcccaaaatgctaggctgtcacctaggctggtcttgaactgctgggctcaagcagtcctcttgcctcagcctcccaaaatgctagggttacaggcacgagccactgcgctgggcactctggtgtctgcaagtgctgaccccttcagaatacgtccattgggcgttgtattttgtattctttgtgaagtatccaagtacgtttcaaagaagaggacagggtatagggtaagactgtcctttgcattgtctgctttgtttggttgggttttggggtagggacagctatcacttggctgccctggagactcagacctagagctttcactgagggtgaggctgacgagggggctttttgctgaagcttccagagggcttgacgagatcagttcctgacctggcctcactcagcacagcagcatcgtacaagggttcccaggttgttgggtgagggaggcatctgcaggcggttccccacagacacagtcacctcctggatggtttccctgtgtctccactgacacacccatgactgttttatttcctcctgttagacaccagagccggaagtggaaccgcccagtgcccccgagctcaagcaagggctgtatgagctctcagcaagcaactttgagctgcacgttgcacaaggtaagggggacgtcctgatgccagcttcagagaatcactattattccttggcgtgctgggcttttccttcctgctactcaagggctcttagatagcagcatcagtggcactgacaaagggtcactctagaggagctgttgggaccgttgttcagtgcacctcctctaaaacatgagttctccttttgtctgtgcccttatagaaacgccgagtctaatgctaagcacacgtgacccgcacactagctggacagtgcatccttggctaagagtgtttattgacagactcacctcgcttgattgctctttactttattgcactttggagatactgcatttttttacggattgaggattttggcagcccagcatctggcaggtctagcggtttttccagcagcttgtgcttactttgtatccctctgtcagcatctttttagcaataaaatattttttaattaaggtacattgtttttaaagaagtaatgctgtagcacatttcatagactatagtgtaaacataactttgatattcactagggaacaaaaaaatttgtgtgacttgttttattgtgatattatctttattgcagtggtctggaaccaaacccacagtatctcggaagtatgcctgtgtattaatgataatcatatgcttaatgacctcaggcagaaacaaaagcttctctctgtctaaacagaatttagattgggcacagtggctcatgcctatcatcccagcacttggggagaacaaggtgggatgactacttgagcccaggagttcgagatcagcctaagcaagaccttgtctctacagaagattaaaaaaaaaaaaaaggctgggtatggtaagcgcactcctgaagctgaggtgggaagatcacttgagcctggaaggtcaaggctgcagtgagctgtgatcatgccactgtactccagcctgggtgacagagtgagatcctgtctcagaaaacaaccaaacaaaacccagaatttaatgacaccgttataacatgaatcaaattagttactctttacacttaaaagatctttctataccacatcccattttttgcaaatggtctcctaatatcagaatgatccccataaaatttccagtgtgaatacataagtctccctttattcacacatagatgtgtttcagaaaacttggcccaacaccgaatgacttgaaagcaattttggcttcctggccggctcccattaccaaatgctaccatggagagaaatccccttagaagactgggttggaaacgtgagaaatggcttggattgcctctggccttgtgacttgtgcctgctgggagtcagagcccctcccccaccacacttactgtccacagtaacttatcgtgaggccttcagccttttcccacttttgctaaaagttatttcatccataccagcgccctgacggcagaactctagcatgctttccgctacgggaatgcattttcagctgggattgtcttgggctctgagcagggtgtgtttcccaaatcacctgttacggaccgactccggcaggacagaccgactccggcaggcctagccagcgcctccctaagtgggtcactgccacacagctgtgtcgtgtaggtaccatggtggcttcctgcccttgctggcttcccatcagtactctgattaggttcccagagagcctgtctccaccttacagtgcaggatctactgtgcacctgcacatggtttcagctttgcacattttttaatggaagttgttaacttttaaaggaagtttttcaccattttcttcaagtgcattgttgctgtgctgatgagacagtagctgtgagccttagtgtggcagagtcctgctcagacgccaggccacatgccactggttagttctctccccggccacagcctgctttcagtttggtatcagcccaatgtcagggtagaacagctaaacaccttctgtgtccaaataatgatgctgtgagggtttgtttgtttttttccccgtagccaagggggtgatgtttcattttttaaactttttttcatgataaaatataatacagatcgagaaaacaaatgtagggcttaatgaatttttatagcgtggtcacactgtaactactgtccagttcaagaaataaaactgccagcttcccgtgtcccatgcagggcacagcccgccctcccttctccaagaaggcacttgcctgacatttgtggaaaccacttgtattagtccgttttcactgctgatgaatacacacccgagactgggcaatttacaaaggaaagaggtttaatggagaactcacagtttccacgtggctggcgaagccttcccaatcatggggaaggcaaggaggagcaagtcacatcttatatggatatcagcaggcaaaaagagtttgtgtagggaaactcccgtttttaaacccatcagatctcatgagacttattcactatcaccagcccagcatgggaaagacctgtccccgtgatccagttgcctcttacctggtcctccccacgacatgtggggaattcaagatgagatttgggtggggacacagccaaaccatatcaactcctttatgtgcactgaagtgcacattcctgagcactatagttctatatgtgtatgtgtttatatatcttttaaggctcttttaacctgcatgttctccagacatctctttatctttcttgctgaagacataggtggtttgacctgtagagctccccgtggtccagactttgctaattgtgtccccgtagtgtggtctacatgtttccctgatttctctgtttcctggaaattggtagttgggtctggggacaaaatcagtttcagtgtgatgttttttgggggcacaagaagacctcatagctggtgggggcacagaacgtccagttgtctctctttgggatgtggtcgaccatgacaggcagagcctgggtccgtccattccttagggctgccaagtgccgaggctcattcaagcgtcccttcattttttaaccaagagaaactcaccctcatttatcacctggttattcagcggtacagtgcatataggagaggtgggagaaatgcctgattctttccttttattacagttttccaaataatgagttgattgctgattgtccatcaaagatgacaaatttggttttgagtattgttatgaactcatgaacagaaacacatttgatggagtccctttgtaccaattaaagtgctcatgccgaactaagatttgctaagcaggacaaagatctgattcttcaattaactctctagtgaggtctgacataaattacagttcctctttcccccgtctctgccttggctctccactccaggcgaccactttatcaagttcttcgctccgtggtgtggtcactgcaaagccctggctccaacctgggagcagctggctctgggccttgaacattccgaaactgtcaagattggcaaggtgagtgaaagcccttattaaactggaaatggactgctttgggctggattaattagcagagtggcccattattcattccgtgtgcaaagtcgcaaacttgatttattaattccatttagtgtgccacttgataattcatttcaccttcacagatggcagtctgattttgagttttgctggattttccacagcctagagataaattatggcctcggctgctttgtttattttgaagagatggccaaatctgaattggcagccccagagcccgttctgcaaagagatggggtagagccttgtagaatgttcactggacgaacttggagaccgtccacgttcgacctcacccaagagctctctctaaaaggaccctggctctgtgctcccccaagcacgcagaagaccctccctcagtttgcactgtgcctgggattctttccagcatttcctactttatacagagaagccaagagtggtgtctgacaacttctgtgtaactggattttctggaaatatccagtgtagctccagggacatcacttttattcttctacactttccagcacccaccagacaccatgcatagatttcctttcttaaaaatctcatttttctaccttgccatggggctgatttgtatccaaaagtaatgctgcgtgtctaggactgaatgatggttaacaggatgatctaattgggatggtgagatggtcaaaagcataaacttgggggttgggtagacctggctggctgaccttgggaaaaacctctccacgcctcggtctccccctttgcaaaactgagctaagatctactgtgtggtgtctgggcagatgaaagtacactgcttagtgtgatgcttagcatggggcagatgcttggtaaattgtaatcacttttgttgtcagttaaatggatatttcactgttgcctcttaaacgcttacgataatatatactaattatacatgttattatcagtttatatttattgaacatttcggggaagtaattataaaataatcttgtctactgtcttaccccattccttgtatccttacttaattattgtatgaaaatttatgggagattcttttaggtttatatccatagaggatcctagcagacctaggcgtgagcagacacaagcccaggtgaccacgctgaagcccttcatccctggcacatgtggctgggttacactggacccttaaaaatgcttgtcctctcccgaccttgggctgaggcctcttgtacttcagttccgcaccttagctgctctctgacgggtcttaggtgttgaaatagtatttttacccccgtttgctgacatagtgaataacaacttagtcctgcctattttagtgctggtagaaaataaaaaagaaagcaatgacttagaacaagatgtttcatgaaaatgttgggcaagcagcagctttatgagatttaaatgaaagaaaaagcttgaagagctgtgcttgttggtaaattaagtttataaaattaaggacggattataatcttgacatctttgcagtcttacctttattatataccaactactcctgtttaaaattcatttcttgctccctgttgattttaaaaccctctaagcttcagcatgagagtaaattctaagctggcatgtgaactggtctgggtcccagtcaccgacagccaggctaacccccctcccaccaccaccaaatgtcaagccagggccctgactccagctaccaggtgctgactttacttgctcgagttaaaatgttgcttcctaaaaaccggcatgtttaactgagctattaatacaataaatcttgcctctaaagtctttcctttactccttttagctcaggtatgttttagcatagctttcaggaacattctcttcaaaaactgcaccttgctggcagagttgctacagaatgtggattttgaaaagaatatttgtaacgtacaaagtgtccagtagccccattagcaagaaggttcatgaagaaactgactgggaagttgatctgcttttattctcaggttgattgtacacagcactatgaactctgctccggaaaccaggttcgtggctatcccactcttctctggttccgagatgggaaaaaggtacgtctgcacttcttagtactgagaattcttcatctcttaaccccatcaggctgagctactgagtggtttaatgggcacagtgaattgccaatcttgattgttagggcactggtttggagaaatgtgtataatgaaacaaacgtctttctcttaattgataagatttgggttgtggagatgaaccttgaaacatttcagtggcccaggttatcactagaataacccacatcttacagtcacagggtaactgtgctctggtcgtaaacacaaaccttcaggcctttgaacagagctaaggcttgcacttggtccggttctgcctgcctccctccctccttccctggccgatggtcagcagctcagagttccccatcagcacaacggcttgctggcaggcctctgccccagacttctatgatgtgtaaccccgtggagggaagaggggcctgtacagttctctcaccaaagccgaggcattcagttatcctctctacattcccgtctaaatatgaacatgcagactttgcaccaccgctaagacatctgggagctctgacccgggcaagcaggggttgcaggaaggcttaagtgattcagaacacctcagtggactcactcagccgcgtgcccgtgtctcggccaggtggatcagtacaagggaaagcgggatttggagtcactgagggagtacgtggagtcgcagctgcagcgcacagagactggagcgacggagaccgtcacgccctcagaggccccggtgctggcagctgagcccgaggctgacaaggtgggtgcctgctggagtcgggatccccataagtggcccgtggcccccggccccccacctccccaccctcagaggcctcctcaaatgctttggacaaaatgacagtttggggacacagtcatctgatggttggctccagttgcgttttcaacacgtatttttcatcgactttcacatgctttcaggggcgaatgcaaacaaaagctttccttttgaaaacatgaaatggatgtgagacaaatcccaagacaatatttggtgtcaaaaatctctagagaatccttcctttccgcttcattcattttaaagaatgactctgctgggcatgtttctgctatgaaatctcgactgctggccccggggccctgattctattcctgaccttgctccgggcattttcctttacccgttgtaaaggcccctagaagacctgtagccaagagggcatccgcagcgatcaggccagtgactgtagctgtaacctgcctaggcagtcctgatgcactgaggggcttccttccttcactcaggtagcaggaggtttcagattcatttgttctgctttatgaagcccttgttatgtcacaggcactgttctaggccaccaggaaataaaaataagaccggtttcctgcctctgaagcatacaggtctctgaggcaaatggtgagaagacacacaagccaatggcagggggctggggcagaaatgtgtgcagggcttggctgctagagagaagtgggggcaaatgggcaagaagtgtccctaaagagctgattgacgggatctgtgctggacagataggctgggcagggctgccactgaggggctgcaccaggagaggcacaacccgagaatcagccggcatttctgcagggccagagctggggctgggggaacacagtgggagacaggtcagggtgtggtgtaggatccctgagagtgagagaggagctggagttgagagtctgtgggcagctggccaaggattatgaactgtatcccatattgacagggagcccacggaggctctgtgcagattggagttgtaggaaaatgaccggcatgcacgtgtgctggaggtgggaagctgctctattaggcctttaaagatgatgagttccctcatgctgcagccgtgactgtgcgatggcgaggaggagaaagccagcataaggagtccagccgctgtgcagcgcggaggagagggagggagggtccgaggcgagtctgattcccgcatatctggtggaggatggtacccagcacaggggcggggccagagctcgaggaaagggatgagcttggttttcaaggtgttgatcttcaaggctttcggctgtgtaggtggcagtgtccagtggcagttccaaccatgagcctggggctgcggcaggaggtctgcactggacgagagtgcccgtgtcatcctcttcaggtagaagtcatgcctgaaggccaggagtttggatttggaaaaaccagtggggccaccaacccctcctccctggtggggccacaccaggcctcctcacccctacaaccctgtccctagttgggctcttgtaggtcggggatggcctgagtgttgtttaaaagttgacgttttggttgaagaagtaaacagctgattttgtagttgtcaggaccacttatgttagaggagtgtatgtgtcatggtggttacaaaggtcatcccaaattgagtataattatacaccacggatgttttcatcgcagcaccatttctatttataatgcagttttccaccatgaagtgggtcttttcagtgcgtgtggcgtcatgtttctggacataaagatggtagtgttccacagtggcccccttggcctccgtcactgacatgttactcgatgccagactcaaatggagcagccctggtacacttagccacgtgataaatcatcccattcctgctctcaggagagaatcgcagatccatttttggagaaacacatagacgtcattctgtaaagaactgtcaagggagaatggctttaaagcagactaccatgtagcacctttcccttaaattctccagccagagcttccatcagcgtttttcacattgacttagaacaggctgctttccatttttatgttcaatgtaaaacaggtatcattgcctttgctattgtaactaggttctttctgttgcatagagaggatgtcacaaagggtgctaggagaatagggtggccagtgagaaaagcggctgaggatgagacttcagtgggtatcctggagactccaggcttagaggtgcagactcaagtgtcggacacccagggctgcctggtccacaccacagcgccctggagagttttcaacctgcctcatccccaaaagacagtccccctccccaccttcatcccctgtacagtatccagccacctcctcaccacatctcccaggcttgggacccagggacttgcattgatctctctgcccttcagaggctgccagcctccctttgtgtgtagcctatgaaatgcagattgtgtaggtatttctgtgtgaccttggagcctacgtaactgcatttttaaaaaattactgattcgtgtatctgcaatcccaaagcatggccctgctcaactttaagggatgtacttgaactgtggctttttcctcccttgaagggcactgtgttggcactcactgaaaataacttcgatgacaccattgcagaaggaataaccttcatcaagttttatgctccatggtaagtggctgtttaattagaaactactttgtccatgtgtactaagtcacatcatgtttttcagctcatctgccacccctccagactcaatgttgggcacatgttacatttatatgtaggtcatgttgtaggaaataaggaaccgttatcatgctcctatattcaaatattttaaacttcaatggccttaattatatatggagaatgaggctacagttatatcaactttgattatatatggagaatgaggctaaagttatatcaactttggagaaaacataaaaatggaggcaaattatgatggccatattcagttttgtggtatctgcacttttccaaatagatggcttttctttttggctaaacaatgagtgtcatgatgtagctttgctcctcggttcttttaagtactcggatttcttttgtagagaaatccagtagagtctgttagagccattcagtatgctacgcagtttcctgaacctgcatgccacgtggtcttggagaccagagcagaaatggattgcaggtagtgtgagatccagacaaccttggttctaagacttaccgtgaatgactgtatagtaaacttggatgtcctttaattcctttgaaccccagttccctcagctgaaaaatgggagtaactttttgtcttcacaaataaaacaatccatttggaaaagcagagtgttaggacaacagtagattgtttatctaaacatgataaaggcgtcacttttcttgtttgttacactccacatgttcctgagaaactaaccataggggtaaaaagttaataagcacaggacttgaacgaaccatagcaatgcctttcaaatcatttgcaacatttaaaaacctaaagctccacagatcaagtatcaaaaaagaggatcccctttggctgaaggggagccatccatacggcaggagggggtcagaagagacaagggaacagagtcgggtagaagggagggtttgaaccaaacttaatcatggccttgattctcaccccacatcgctgaagtaccaaggaggccttaaaatggttttgaaattgtgagaccataagcaatcaaatctaaaatgtctttggcattcaagtgaccttttagaaattgtgtggcatctgccctgttccctgttcctctgctcctgtgctttcataaaccagttagcacagttcaccatggcatggaaatggtctcagaatctcaacttgttttgagactggcttgcttctgtcacattatctgaaagtctaccttggatcaacttttgggttcttcatttgggataggaggaggaagagttaatgtgcacccagtgggagaatttggtattttacaaatttctaggcaattgttgactgtcccatacagaagaaacagagcttgtcttggcagcagagtgtaggtgaatgatctcgacccaggatttcaacgaagctgccatttttctcgtcttaggtgtggtcattgtaagactctggctcctacttgggaggaactctctaaaaaggaattccctggtctggcgggggtcaagatcgccgaagtagactgcactgctgaacggaatatctgcagcaagtattcggtgggtacttggatggatgcttatgggagctctcagtatgggggcagatcccaagggaactgtgcctcaaccacgataactcactctgctctcatcttctcaacaatgtggtttttatgtccctttgagttgtttgtttggagaagcaaaagagatcctctctcaaagggaaggcattcttcttcgcccgctttgtagttagtatccatgtttcagtgcaggttttcaggccttgctgtctgagtaacaaggccgtgaagtaacagaccccacgccatagactgtggggcttcccacaccgcgactcttgatgattgaccagtggtctgtagcctttgccataaatacccgagtcgctcatttttcacacataagccagcattataaaatgcagtggctgaatctaagaatcatttcaacataacctcctttctgaaagggccatgccagcaagtcggtcctgtgcttgggttaactactgccttcattccaagctgttagcacagtctgatggcctggaagatttgtcattttttttcttctttgttattcagacacttttggagccctttagatggagaatagacgtaacccagacatagtttccttatcattaaaagataccagttgttttttgtgccctaaaattcttagaaacgagttgccactgaaacatgtatcctcaagaggatcttgctctcatggtctggtctgcagaccaccagggcatcgccagggaggtcattggaaatgcagactcccaggcctgctcaatccaaatctgcaccttcagcagatccgcaggtgatcgtgtgcacagtaaagactgaaagcgtctgctttagggtaaagtcgttcctttgaggctgatctttaatgatgtcattttgaattcacaagtgaacacacagccccacggctgtgctttctaaacagtagtctgctcctgttttaatggaatatacacctttaaaaattagccacagaatttttccagccacaacggtaggagtgtatctggttttatttaggaagcaatttgcatgtgatctggaccgctggtttgcaaacttttttcttttttgttttaaggtacgaggctaccccacgttattgcttttccgaggagggaagaaagtcagtgagcacagtggaggcagagaccttgactcgttacaccgctttgtcctgagccaagcgaaagacgaactttaggaacacagttggaggtcacctctcctgcccagctcccgcaccctgcgtttaggagttcagtcccacagaggccactgggttcccagtggtggctgttcagaaagcagaacatactaagcgtgaggtatcttctttgtgtgtgtgttttccaagccaacacactctacagattctttattaagttaagtttctctaagtaaatgtgtaactcatggtcactgtgtaaacattttcagtggcgatatatcccctttgaccttctcttgatgaaatttacatggtttcctttgagactaaaatagcgttgagggaaatgaaattgctggactatttgtggctcctgagttgagtgattttggtgaaagaaagcacatccaaagcatagtttacctgcccacgagttctggaaaggtggccttgtggcagtattgacgttcctctgatcttaaggtcacagttgactcaatactgtgttggtccgtagcatggagcagattgaaatgcaaaaacccacacctctggaagataccttcacggccgctgctggagcttctgttgctgtgaatacttctctcagtgtgagaggttagccgtgatgaaagcagcgttacttctgaccgtgcctgagtaagagaatgctgatgccataactttatgtgtcgatacttgtcaaatcagttactgttcaggggatccttctgtttctcacggggtgaaacatgtctttagttcctcatgttaacacgaagccagagcccacatgaactgttggatgtcttccttagaaagggtaggcatggaaaattccacgaggctcattctcagtatctcattaactcattgaaagattccagttgtatttgtcacctggggtgacaagaccagacaggctttcccaggcctgggtatccagggaggctctgcagccctgctgaagggccctaactagagttctagagtttctgattctgtttctcagtagtccttttagaggcttgctatacttggtctgcttcaaggaggtcgaccttctaatgtatgaagaatgggatgcatttgatctcaagaccaaagacagatgtcagtgggctgctctggccctggtgtgcacggctgtggcagctgttgatgccagtgtcctctaactcatgctgtccttgtgattaaacacctctatctcccttgggaataagcacatacaggcttaagctctaagatagataggtgtttgtccttttaccatcgagctacttcccataataaccactttgcatccaacactcttcacccacctcccatacgcaaggggatgtggatacttggcccaaagtaactggtggtaggaatcttagaaacaagaccacttatactgtctgtctgaggcagaagataacagcagcatctcgaccagcctctgccttaaaggaaatctttattaatcacgtatggttcacagataattctttttttaaaaaaacccaacctcctagagaagcacaactgtcaagagtcttgtacacacaacttcagctttgcatcacgagtcttgtattccaagaaaatcaaagtggtacaatttgtttgtttacactatgatactttctaaataaactctttttttttaaaagtctggtctttccttcaatgttacagcaaaacagatataaaatagacaataaattatagtttatatttacaaaaaaagctgtaagtgcaaacagttgtagattataaatgtattatttaatcagtttagtatgaaattgccttcccagtacatgattgtgaaaaagacatttagaaaatattctaaaatttaatctgagcctcactttctacaagggaaatcatgatttccgttcataaacagcatgctcatccccctaacaccattcttataagctgggcaccctcattttattttcttcgttggttctaaccctgtggcgtggtatgctgtatagtaaaaaggcagagaaccactttactgaaaaggtactagagccggcagtccagaagttaatgtgctggtcaaagaaccgttctggtaaagaagaggtgagcactgccttcacgtgttacacggttacacaccccttgtagcctcacctcagtgtaatcagtctacttttggtactagcaaagagtacagcaaatggaggattgaggtgtagaaatggtatgttttggctgaaataagtgtattttcacaccaacaaaactccagcacgaacatacaacagcaatgactgagacaagggcgccccgtggagccctggctgtggcctgggctgtgcgtcctgtggacttctgggaatgaactgaacagaggcgttccccccacttccccgatttctgttctctgtaaaatctacctttgatagacagtactgaaccagctgatcctttagccaagaatacatttaactcctttgagattattttccctatttactaacaaacaccccaaatagcttgatctacagctaaaactaattttggtgggtttttgggggaggagggtaggaagagcttcacggttatgtttctgcagttaccagaccttatgctacagacatccaaactcagcttgctacagaccaacaactactcacgtcatttaccaagtgagcaaattattaatgaggtcctttaaaatcttcctgggtaataaggcactggcatgagatagtttcaaagtctcatcgtcccacctccaactgtgcttccgtgtttttttaaggcagatgtaatctaggaatccaaggcagaatgtgtgtccccagcatctggtttcgagttagtggcatccacaagctcttacaaccatattcctgtattttttcagaatgacattggagttgtcatcaaagtaaagaaccgagatggcatttagcttagttggcgcacagcacggtttggggacatactcggggttcataaggtgaacctgttccaaaacagaaggggagaaggtaccttagaaatgacacctggtcttggcttactcccacttacaaaacaaagtctccgagagctcaccaaggtctgcacaatcgcgtggttggttgcattcatgtgtgcgttgagtgggaaggagcattctccatcacagtaattggcagcatagcccttgggtgcaatgatccagtccttaatttcatgcaaaggaagcaacaaaagatgagcatgcacttctcacactatttgtgcttttcaggaatgctgtgaaaaggtatttttcacattgcacaggcaaggatacagacgcaggaaggcttaggaatttgtccaagttcacattcaagtggcaatgctgggaagtgaacctggtccatctgaccccagagccctcgctccttgcagaggcccacagggcctcagctgctacctggaagcacgtaggttgccagcaatatgtgcttggacccaagcaagcctctccaggagcccacggtgctcctgcggaagtagtgccacctgcatatggaagctaccttt

SEQ ID NO: 1236 - DNA, 17239 bp, Homo sapiens
gtgactgtggagtttgaattgggtggcggttgactgtagagccgctctctctcactggcacagcgaggttttgctcagcccttgtctcgggaccgcaggtacgtgcctggcgacttcttcgggtggtccccgtccgccctcctcgtccctacccagtttcttgcttccctgccccatctccgccgctccccgcagcctccgccgagcgccatggctcctaggaagggcagtagtcgggtggccaagaccaactccttacggaggcggaagctcgcctcctttctgaaagacttcgaccgtgaaggtaaggggccaggccgtcgcggcctcctggggcggtcgcgggatgctggcgggtggggacacgagctgcacagattcgcccgcccgtgacccgtgtcctgtcggctctgccctcccgcagtggaaatacgaatcaagcaaattgagtcagacaggcagaacctcctcaaggaggtggataacctctacaacatcgagatcctgcggctccccaaggctctgcgcgagatgaactggcttgactacttcggtaagagctggagagcttccctgggcggaggccaggagccccttggggttaggtgacacccttcagaaagggctcgctcagatgtcaccttttaatgagatctgacatgaccacttatggaaaattgcagaccctttcactctctgtctcacttccctacttcatttttctctatgaaaaatgggggggtggttggggggcggcgggcggggcggtctctgtcggacaactcagctctgctgtttacaggtccaaaacagctgtagtgaatgggcatggatgggctgtattccaataaaattttagttatggatacactgaaatgtgaatttcacataattttcacacatcaggaaatttatttaattttttttaaacagagtctcactctgtcacccaggctggagtgcagtgcagtgcagtggtgcgatccctgctcactgcaacctccaccttctgggttcaagtgattctcctgcctcagcctctggagtggctgggattacggtcgcctgccaccatgccccgctgatttttgtattttcagtagagacggggtttcaccatgttggccaggctggtctcgaactcctgacctcaagtgatccacctacataggcctcccaaagtgctgggattacaggagtcagccactgcgcccggccagaaaatagtatttttaaaaatatatgtatattttacccatttaaaaatgaatgaataaatgacatggttagttaaccagagctcagatagaagaataacccgaagcagctccttctgcagcttatggaaattgctaacctaaaaatgggcgcatcaggctgggcgtggtggctcacgcctgtaatcccagcactttgggaggctgaggcgggcagatgacctgaggtcaggagttcgagaccagcctgaccaacatggagaaaccctgtctctactaaaaatacaaaaaagttagccgggcgtggtggcgcatacctctaatcccagctactctggaggctgaggcaggacaatcgcttgaacctgggaggcagaggttgcggtgagctgagagcacgccattgcactccagcctgggcaacaagagtgaaactccgtctcaaaaaaaaagacacatcagttttcctggccagagaaaaatcccagcctgtttctgcactcccttattaaatgtccggagaaatgcaggaggctgtacttttctgctgggttgcccttttctgttttccttattattaactatccagcatgtagtctccttcctggatagaaatgcatggtctgctcacatattagacattgaatgatccttttgacttgcccttttatttattaagccattcatttgcttatttctccaaatactgagcatgtgtcagtcacagtgctaggtgctaaagatgcactagggaataaaacagacattgtctctgccttcaggaacatacagattagtagaaaagagctattagaaaaatccacatacaattatgtaattaaaagtataggtactacaaaggagatagaatagagtagtggtcagtgagcatattgtgctttctatgccagatgggcattgtaccaagtgttttacatacattaactaatttttcttcataactaataatatccctatttttcaaaatgacaagattaaggcacagagaaattggacactttgctcaaggcctcataagctagttagtgggatagtctgtttgaacccaggtattctggtttcatagcctgagatcttaactgttttacaagatactatgagagtttctagcaggaggttctaacctaactttttattctacatgtaaatctcacaaagaccttttcattcaacacgtttactgtacatctattgactgctagatttttgccagaagcaaaggatgtcatctctggaattcagtccaaggcagggatggacatttaaacagctttgagtagttattgggtataatgagggtgagcaactaactctacactttgcagcaaactgctgagatagaaaaataagcaggctgggcacagtggctcacctggaattccagcactttgggaggccaaggcaggtggattacttgagcccaggaatttgagaccagcctgggcaacataacaagaccatatctttaagctttaaaaaaaataattaaaaataaatttttaaaaaagaaaaataagcagagggcagggcatagggtggggattcatgcctataatcctagcactttgggaggccaaggcaggagtatcacttgaccccaggagttcaaaaccagcctgggcaacatagcaggagaccacatctctacttaaaaaaaaaaaaaaaaaaaaaaaagacaacctggacaacttggcgaaaccctatctctacaaaaaaacacaaaaattagccgaatgtggtggcgcatgcctgtagtcccagctacttgggaggccaaggtgggaggatcagttgagcccaggagacagccaaggaggcgccactccactccagcttgggtgacagagcaagactctgtctcaaaaataaataaaatttaaaatatattttttaaaaagaaaaataagcagaatttttggggtgatgtttgagctgagttttgaaggatgagttagaaatttgttaagtacggaggtgaatttcaggcagaggaaatacaaagtaccatggcaacaagtcatgagagtcagtggcacatttgggatataacttggagaaagaatagattagatggtgaaggtccttgaaggttagaccaagggctggaccagttttagaaagataaatggtactattaggcaagatgatttattgttaaaatgtaatagtaactacaacgttctttttaaagcccttggaggaaacaaacaggccctggaagaggcggcaacagtaagtgacctttcctattttccagccagtggttacttaagtctagtccagtccccagatccaactaatagatgcttactgtggaagaggtttcataaagggacatcatctgtttgtgtcaactgaaaaattagagttggaccagacactgtatacatgagacccagatagttctgagccctacagaaggtggcagttctgtttttgaccaatttcttgcagtcctttgttctgaactctacagcggaagtagaaagcctcaagcccaagttcctttaagcgcctgagtcattacactatgcattggcctgctagatgataaaggtgtttcatcatgtcgtactgtagaagcagtgcttttgcttgggatgctcagtattccccaacccctctcatctccttcctcccagcatcagtgccaggattgaaggcagtaagatggggatgcaaaatagagcatttaaagctgcactgtccagtgtagtagccactgggcatatgtagctatttcagttaattacaattaataaaattaaagaattcatttcctcagacatactagccacattttacatgttcaatacctacatatgactagtagctactccatcagagagcacagaaatagaacattgctactcttgcagaaagttttatgagacagcattgggaactagtccatacatgggcttcacagagtccctaggcactctaaaataatatacaaacaatgcgtgtgtatgcacgcatttgtgtatctttctgttagtttattgtagccttgatcagatttacaaagtaaaccccaaaattacatcttttgttgagttgatcagaatcatttggaatatcagggtttgaaggagtctgaccaccaagggcacatagcagatctccgccagcttcattcagaaggtaaaggtaatgaggagccaattatcaatttggaaaaaattggagcatttgggagagaggtggggattattcacccccctacatacactgagctccaatgttttaaaagagttacctctgagatgaattatgcttactagctaatgcagttctctctttttaaattagaaatacagaactgcaaatgagaacttctaatgtaatatgagagagccattgttaccacaccaagttgagagaattctagccttgactaatatgatttaaaactccagaaaggaacgatagaaaatctataaaagctcttagttgggaagtgtgttggggctcccaagaccacctccaggtttggtgattcactaggaggattcatggggctcagcatacagtcacacccatggcgatgatttattacagtgaaagtatacaaagcattaatcaacaaaggagaaaattgcataggacaaagtccagaggaaaccaggcttctaggagtccactccctgtagagtcaaacagaacatgcttaattcaacacatatgaaatgctgtctaccagaaaatctgattagagagtcaatgcccagagttttaactgggggctgctcacataggcatcctctgcctagcacatgtcaaaatcctagactttcaggagggaagtaggtgttcagcatgagccatattgtttgcataaagtttaggcacagtgaggcatcttgttaaggaaaggtgggaatctttctgaaatcaagttcccagatgccaaccgaggccaggcttgcaacaggccctttctatgtgtatcagtctcaggcctgctctgttaactgtcctgcacagtagatgcccagtggcctgccaccactgatgactccataaaatgccagttgtttctagagatggcagaaggttggcaggaatgcccctactttctgttgcatcaagcctggcaaacatcagtaacttattacagccctatttcttgctaagcctaagacagcctcagaatccttctctgagtatgtcaagcagtccctaccagaaatgaaacctgtgccattccaaacctgtagtaattattctgatgtttacatgtgttctataaggaaaggactgtgaatcatgactgctctttgtagtgcccatacttattaccatatgaaaaaaaaacgaatttgaatggtgactggaagcctttttgaaggacccaggatcatcatagaaaaccttattgagaccctgtagatttatcgaaaaaatggtaagcttgacacaccaccaagtgttgtagaggatgtagatcattaggaacttgtattgtttgcagatgggctgtagtcaagggtaaccactttgggaaacaatttggcataatgcgaaggctgaatatttatgtaacctataatccctgtcatgtcctatccaaaggatagagccaaggggaaacttggacatgtacctcagacacatgtaagacagttcaaggtagcagtgtttataatagcaggaaactattgatggaagatggacaaatccattgtggtatattcacacagtgggatatgatatagcaatgaaaacaaattaactacaaccacaaagagtggtgaaaacagccaaaaccaaacaaaatgcttaagtacacacttgtgaaaaagcacatctgtgtgtgcacacatgtatacacacatatgcatgtatctgtgagcacatacacatgtacctttcgataaagcaagtgcaatgatatggttacccctggggaatgaaggattaggagactcatcacctttggaagaagagataagaaaatggaacaaggaatgaatacagagccagaagcaagttattggcaatgttttaggtcttgggctgtgtggtgggtttatgggagtttgctatattgtatattgtatcactaacatttaacagtcttatgtattaaataatagttttaaaaaagtttttatcttgaaatattgttcctcatattttggtggaataagcctggtgctttctggctatgtttgtcataggctgacctggatatcaccgaaataaacaaactaacagcagaagctattcagacacccctgaaatctgccaaaagtgagtacctttcaaaactccttgttgtacagaaagaactgaggctcaggttgcttggttggctgctcaggcagcgccttgttggtagagcctcttccctttaatgtctggttcttaatcttgtaaatccaaaaacttgcttttggatggtgcatttagttaattttttttcccccgaacagcaattcaaaccagaaatttagttaattttaggcaggactgctaaaaaccaaactcaagacccgtgtgcgagctaaaatgaaagtgaaaaaaggggggaaaaaagctgtgctagaaaccaaacattgttgcctgcttactttctcctgggttaaatagatgacaagatttagagaggtgttaaaagactggtaacaccaactgagacgctccctgatgtaatcaacaaagttgaaagcgaattgaaaaaggaatgactttctctgcatataattcaaaattactcaattcaggccaggtgcggtagctcacgcctgtaatcccagcactttgggaggccaagctgtgaggattacttgagcccaggagttcaagaccagcctgggcaatgtagtgagaccttgtctctgaaaaaaaaaagaaagaaagaaaggaaaggaaaggaaaggaaaggaaaggaaaggaaaaaaaaagttactcagctaggcgtggtggctcacgcctgtaatccaagcactttgggaggccgaggtgggtggatcacgaggtcaggagttcgagaccatcctggctaatacggtgaacccccgtctctactaaaaaatacaaaaaattagccgggcgtggtggcgggcgcctgtagtcccagctacttgggaggctgagacaggagaatggcgtgaacccgggaggtggagctggcagtgagctgagatcatgccactgcactctagcctgggcgatagagcgagactctgtctcaaaaaaaaaaaaaagttactcaattccatgatctatccacataaaatcatcttacatacatgtcccgcactctgagaaacactgtcttataggaaaagttgtatgggaaaccaggttttgactagtgagcaaggaatcggatcaggatgaattgtgacatggacttaatgtcactgtcattaagctatgatagtttgatgcatccaattcttataagaacatcctgacccatggccaggatttcggggctacacaccagggcacgctctacagtaggcagggcaagctcaattattcagaatgctgggctgtccctacaaagcatcatatggggtctcttaacactctggttagtttcctttgtctaaaccctctttcttaaaaagtcttctttatttttagtccatttcttccttgcagcttaagattgtgtacattttattcctataagaaatgtgaatgcacaaaactttattttcatcagaaataccaccctgttgaaactgtttcttacagcacgaaaggtaatacaggtagatgaaatgatagtggaagaggaagaagaagaagaaaatgaacgtaagaatcttcaaactgcaagagtaagtggacactgaggttggaggctgggggttatcacaagacaagcaaatacaaatgcataaaatacactgttgtacaccagagctcacagtttagtagagatgatcctactttacatggcaatgacaaaagagataattgactggtgtgcaaagtgtgtagaacacagaagaggaagctagcaagcctcccctaccccactaggacatagacaggcctttcaaggtgagtgagagtctactagctagagaagaaagggaagaggaacagtattcaggatagatgggggaggcggaaaactgaagatgaggaaaccagttagaagcctatgaattcttgaactgacatgctgacactatagaatgaagggatggtttttagataggttttagaaagaagtggcatggttggtggagaaaaggaggaatcagagacaactgcatggtttctagctaaggcaaatgctatccagtgaggtgtgggacccaggtggcagagggtgctggactgggggtggtggagcacatgccaattgcatgacatgttgaccattcattacttttccaggacatctaggctagacagaaatttcagcctggagctcagggagaagagggagatttgagagatacactgcctcccagatctttaggtgtttgtcccagtgtgggagtggagatggttgtgcagggagagcaggaagggagggagtcagggtggacactagagggagggtagagagaggagctcctaaggcagactgccaaggaagttagagaagcaggaaagacagatccatcacggaggacaagggaggagagaatatatggaagataaggagtgattcttgccagggacctcccaggccccaggaagggagcactgcagggtttgcctttgattgggcacctgggacgccctgagtgaccttcacagcagccctttatgtaaagtagtggggtacaagccaggctgcaatcagttcaaaagagatttacctttaatcttggtcaaaatcctctattttgaaaacccagccagtggaagtccttattcaattagttatgttctgaactttttaagtcattgaattctgagatacaccttattatatttagtattaactatccaaagcttgttcttaatgctttaaaaaaaaaaaaaaaaccctccttaccttcctctttgctgggttttttgtaaccttagtctcatttgattgtgactgcaggtcaaaaggtgtcctccatccaagaagagaactcagtccatacaaggaaaaggaaaagggaaaaggtagtggattttctaaagttgtggtgttttgggttttattggagagccatatatatcatggcagaaagtgaggggcagtgaaaaggctctggtggctagtgtttgaaagcagcttaaaatcactgaatccttgagtatccaagctggaggggtctctagaaatgacctaaaccaaaaccatctccagtactttaatgtacattctctatccttccccacttttttttttttttttttttgagacggagtttcaatctcgttggccaggctggagtgcaatggtgcaatcttggctcactgcaacttctgcctcgcgggttcaaatgattctcctgcctcagcctcccgagtagctgggattataggcatgtgccaccatgccggctaattttgtatttttagtagatgcggggtttctccatgttggtcaggctggtcttgaacccccgacctcaggtgatccacccacctcagcccccactttttttttttaagtatagcaagaactgcctgttatgtttcagttcctgatagtccatatgtagagctaccccatagctcgtcatagagtggctgtcacttacctataattggtttcttgaaatgttttgtccagtcctgcaaagtgaagaacctctatgggcttgagttgattatactggactctaccataagccatgtgggggaaggtacagcagcttaggagagtagtcaccgggatgcatgtctgtggaggagcgaactcatttctcttgagcagtgcagcagctgcctggcacaaggacagaattccagctgggggagccttcgcatgaagaggctgtctccttgattaaaaagtcagattctgaggctgagtgtggtgtctcacacctgtaatcccagcactttgggaggccaaggcaggtggatcacttgaggtcaggagtttgagacccgcctggccaacatggtgaaaccctgtctctactaaaaatacaaaaattagccaggtgtggtggtgcatgcctgtagttccagctactcgggaggctgaggcaggagaatcgcttgaacccaggaggtggaggttgcagtgagccaagattacgccattgcactccagcctgggcaacagagcaagactccgtctcaaaaaaaaaaaaaaaagtcagattctggaggcagactactttggttcaaagttttggctccatcctaattggatatgtgatcttgggcaagtttttaaaacttgatgcacctgagtttctgcatctgtgtatgaggatggcagcagtgctggcctcccgtgttagaagggtcacgtgagtcgatgtgtgcgaggcgcccggagcagtatctcacagtcagctctccacgtgtcactcctctgctgctgccttcgtggaacctgagagttggcatacctgatggccatttcttacctgtaggtcaagccgtgctaacactgttaccccagccgtgggccgattggaggtgtccatggtcaaaccaactccaggcctgacacccaggtttgactcaaggtgagtatcgagggaaacacttggatttgatgggactccaacattgagcactacccagagaaggagtgtctaagaaaatactcctaggccaggcacggtagctcacgcctgtaataccagcactttgagaggccgaggcaggcggatcacttgaggtcaggagttcaagaccagcctggccaagatgatgaaacgctgcgtctactaaaaatacaaaaattagttgggtgtggtggtgcacgcctgtaatcccagctactcaggaggctgagacaggagaattgcttgaacccaggaggtggaggttgcagtgagctgcaattgcaccactgcactccagcctgggcaacagagtgagactctgtcttaagaaaagaaaagaaaatagtcccgagtccttggcctgggatgccttgtcagaggacagtggccagctgggtttcctggtgtatgcctctcccttaagtgtagtttcacctatcttcagtggcaaaatgattctttaatgggagggaggtgaatattctgcctgtgatgactaggaggcctctaggtgacgtttttggccttttctgattcaaatcagaaggtttttattttatttttaaaatatttatttattatgaggcagggtctcactccaatgcccaggctggagagcagtggcacaatcacggctcactgcaaccttgacttcccgggctcaagtgcttctcccaccttagctcccaagcatgccaccatgcctggctaattttttgtttttttgtagcgatgggatttcgccaggttgcccaggctggtctcgaactcctgagctcaagcaatctgcccacctcggccttccaatgtactgggattacaagcatgagccatcacacccggcctcaaatcagttttttaaagatgagtaggcactctcctgtactcttggtagaagtaaaaattgatactgcttttttggaggctggcataagcgaggatattcttgcagcataagttaataccttccaaagaacctagttgaccaaataggagatgctgtatagccattaaaaaagactggatctgtgtgtgctgacagggaaagagcaccgtgatcacagagcatctccgagcaggttgctgaacactgtgctgtatgatcccatttggttttatatacatacaaagtttctggaaggatagataaggaattcagagtggttacccctggggaggagagcaagaagtggttatctctggtgtggggaagtgttgaagatttattttctacttttaattgccactttttttttttttttttttttttttttttgagacggagtctcgctctgtcacccaggctggagtgcaatggcacaatctcggctcactgcaacctccacctctcaggttcaagcaattctcctgcctcagcctcctgagtagctgagattataggtacatgccaccatgcccagctaagttttgtatttttaatagagacaggattttgccatgttggccaggctggtctcgaactcctgacctcaggtgatccacccccctcggcctcccaaagtgctgggattacaggtatgagccacggcactcagccagttcccacttttctttactgtttgttttctcacatgaatatgtaacaaaaggcatttagggaaaactaggtagcagtattttaactgtcttgagaaattagtataatgatgtaatatctaaatcatcctcctttgcctctgaaaaattcctcttgatggaagcagccacgcctggaaacaattaaccagcgtatttctggctttgtggatggatggatgatggcacccatatggagctttggacctaaactttatgtggataagagttggctttttgtaagatgtatgttcaataattacaaccttctttctccagctgtgtttagtcattactgctttaaaacattttttttttctaaatttagaacgtgctttcttaggaatgtatgacttaaaaactgcaacttgaggccagagtaaggttaaaatggcctatagagtttggtgtcatccaattgccaagctatcttcacagagattttcccattctagggtcttcaagacccctggcctgcgtactccagcagcaggagagcggatttacaacatctcagggaatggcagccctcttgctgacagcaaagagatcttcctcactgtgccagtgggcggcggagaggtgaagtatttccaagggaagccaggccacagtgtgctgcttagtcaagcatttcttttccctgggccctcacccacgcttcaccctcagagtcctttcagtgcgtgggtcctgatctccacacttctgcgggactcagaacccagttttctctcccaggttagaggcccagactgcaaagatcgttgctcagctctgggttctgtttttctgttttttggttttgtttttgttttttgtgggttttttttttttttttttgagatggagtcttgctctgtcaccaggcgggagtgcagtggtgcgatctcggctcactgcaacctctgcctcctgggttcaagcgattctcttgcctcagcctcctgagtagctgggactacaggcacacgccatcatgcccagctaacttttgtatttttggtagagatgggggtttcaccacgttggccaggatggtctcgattgcttgacctcgtgatccgccctcctcggcgtcccaaagtgctgggattacaggcatgagccaccgtgcccaccttttttttttttttttttgagatggagtctcactctgtcgcccagcctggagtgcagtggcacgatctcagctcactgcaacctctgcctcccaggttcaagtgattctcctgcctcagcctcctgagtaactgggactacaggcacatgccaccacacccggctaatttttgtatttttagtagagatggtgtttcaccatattggtcaagctggtctcaaactcctgacctcaggtgatccacacacctcagcctcccaaggtgctgggattacaggtgcaagccaccacacccggcctccatctgttcatcaactaacatttgcccatccgattgtagtaggcccaagaagtagacatggggcctgcccttagaaagcagctcagtggtcaagatgggtttgcaatcatggtacctgtgatatgcgcaataatagagatgttaaagggtggtgcagaggagggcaccaccgaggtatgcgcttagtctagaacccggaccatgagctgtgccttcagctttgtataacttaagggattctgaagcaagctgagctcagtgtctctgggctgcatggagcgagttgctgacctcagcccctgtgaggggaggacggtttgtttcagacatactctgcagggcatttcttagatgatgtgcgtgccttttgtgcccaggtaatccagcctccaccctagtgatagtgctgatgaagtcattgtctccttagagctaatatccttcctgcctgtcttgccacttctccatcccagccattccccaccactaagtgcaggatatcaggggaacctaggggttccggccctaagggccatggccagtttaacccactcccctttctattcagagcctgcgattattggccagtgacttgcagaggcacagtattgcccagctggatccagaggccttgggaaacattaagaagctctccgtaagtctcatattcatctccacacataggatgcctccagtagctttcttgggctacctttatttaggattgtcttttgggcctgggctaatactttctacttaaatttgtgttgtcttccttcccccaagagattttgactcttaccctacttagatagcagcagttctgttcctcagttgatgttgagttttgttcaatcccagggtgcctgccacagaagttccactgcaaaatcaaaattctgcctcattcaggcagttagtgctaggggtatgttaggtcactattggccaccagaaagtgaaacctagagtagctcaagaatgagggtcggggcttgttatcaggaatcttacagaatcaaagagcgagctgaacggccaagcctctggagtggtggggcccatcagctggggcctgtgtgctcatttctctcacacatcttcattcctccctcagcagataaccttctccacaggctccaggttctgtgcttacttaacattgttttgcatgtggctttgagtaaccacacctccaatcccaactttattgctctattgcccaattgttcaatttcttgtcttggtttaaattctgaagagggccaggcacagtggcacacacctgtaatccctgcagctcaggaggctcaggtgagagaaattgtttgagcccatgagttcaaggctgcagtgacccatgatcgtgctgctgcactccagcctgggtgacagagaaagacctcagctctaaaaataaagtaaattatcaatttaatttaactgaagaatgtaatggctccgccagggatgaacctccttggtctggtcagccatcatcttgggtggtggatgaagcacttagtgtaaacatggcaaccttaccctcatccttctgtggggtctgaagggtacatccaaggaaggggacaaggcggggctggtttcctaaacctgtctttctgaacataggcccagtgctgagatcccacacacacctagccacccaaatcttgtgactgtcatcctctagctagatctattgcaatgttcttctcaaatctatgatacctttactgtctcacttgagttgttattttactcccttgttcagatgagaaacaggttcagaaaggtgaattcatgtgtgatacagatagagaatggaggggctcaggctgactgtgggaggccaaggggcaagcctgccaagtgacatcttctacaatgacctctctccttttctttttagaaccgtctcgcccaaatctgcagcagcatacggacccacaaatgagacaccaaagttgacaggatggacttttaatgggcacttctgggaccctgaagagacttcttcccttcaggcttattgtttgagtgtgaagttccagagcaaggagccatgttcctctaagggaattcaggaattcagacgtgctagtcccacaccagttaggtagagctgtctgttcaccctcccatcccagctgatcccagtcactgcttgctggggccatgccatggaagcttcccatcagtctcccagctgaatcctccctgctctctgagctgctgccttttgcctcctgcaactcaacatcctcttcaccctgccctgcctgcagttgagggggcgaagaagaaccctgtgttctcaggaagactgcctccaccaccgctacccagagaacctctgcatctggcatttctgctctctatgcttgagaccgggaggtttaggctcagataagtgagctctgggccatgagagggtaggtccagaaggtggggggaactgtacagatcagcagagcaggacagttggcagcagtgacctcagtagggaacatgtccgtctaccctctcgcactcatgacacctccccctaccagccctcctcttcctcctcctcctcctcctgtgggaggtggtcagtgggacttagggatctttcacctgctgtgcccagtagttctgaagtctgcttgtggagcagtgttttatgtttatccctgtttactgaagaccaaatactggtttggagacaacttccatgtcttgctcttctacctccctagttagtggaaatttggataagggaactgtagggcccagattctggaggttttatgtcattggccacagaataactgtctctaagctatccatggtccagtggtccctgccaagtctgtagacttcagagagcacttctctcttatggggttcatgggaacaggggtgggtgtgacttgcttggtggcctcattccatgtgtgcctgtgcctggggcatggactttgttaagcagagtcagcagtgaggtcctcattctccagccagcctctctgccctggagaatcatgtgctatgttctaagaatttgagaactagagtcctcatccccaggcttgaaggcacatggctttctcatgtagggctctctgtggtatttgttattattttgcaacaagaccattttagtaaaacagtcctgttcaagttgtattcttttaagttcttttattctcctttccctgagatttttgtatatattgttctgagtaatggtatctttgagctgattgttctaatcagagctggtacctactttcaataaattctggttttgtgttttcttttgtaa

SEQ ID NO: 1237 - DNA, 7960 bp, Homo sapiens
gtcaaaaggtgtcctccatccaagaagagaactcagtccatacaaggaaaaggaaaagggaaaaggtagtggattttctaaagttgtggtgttttgggttttattggagagccatatatatcatggcagaaagtgaggggcagtgaaaaggctctggtggctagtgtttgaaagcagcttaaaatcactgaatccttgagtatccaagctggaggggtctctagaaatgacctaaaccaaaaccatctccagtactttaatgtacattctctatccttccccacttttttttttttttttttttttgagacggagtttcaatctcgttggccaggctggagtgcaatggtgcaatcttggctcactgcaacttctgcctcgcgggttcaaatgattctcctgcctcagcctcccgagtagctgggattataggcatgtgccaccatgccggctaattttgtatttttagtagatgcggggtttctccatgttggtcaggctggtcttgaacccccgacctcaggtgatccacccacctcagcccccactttttttttttaagtatagcaagaactgcctgttatgtttcagttcctgatagtccatatgtagagctaccccatagctcgtcatagagtggctgtcacttacctataattggtttcttgaaatgttttgtccagtcctgcaaagtgaagaacctctatgggcttgagttgattatactggactctaccataagccatgtgggggaaggtacagcagcttaggagagtagtcaccgggatgcatgtctgtggaggagcgaactcatttctcttgagcagtgcagcagctgcctggcacaaggacagaattccagctgggggagccttcgcatgaagaggctgtctccttgattaaaaagtcagattctgaggctgagtgtggtgtctcacacctgtaatcccagcactttgggaggccaaggcaggtggatcacttgaggtcaggagtttgagacccgcctggccaacatggtgaaaccctgtctctactaaaaatacaaaaattagccaggtgtggtggtgcatgcctgtagttccagctactcgggaggctgaggcaggagaatcgcttgaacccaggaggtggaggttgcagtgagccaagattacgccattgcactccagcctgggcaacagagcaagactccgtctcaaaaaaaaaaaaaaaaagtcagattctggaggcagactactttggttcaaagttttggctccatcctaattggatatgtgatcttgggcaagtttttaaaacttgatgcacctgagtttctgcatctgtgtatgaggatggcagcagtgctggcctcccgtgttagaagggtcacgtgagtcgatgtgtgcgaggcgcccggagcagtatctcacagtcagctctccacgtgtcactcctctgctgctgccttcgtggaacctgagagttggcatacctgatggccatttcttacctgtaggtcaagccgtgctaacactgttaccccagccgtgggccgattggaggtgtccatggtcaaaccaactccaggcctgacacccaggtttgactcaaggtgagtatcgagggaaacacttggatttgatgggactccaacattgagcactacccagagaaggagtgtctaagaaaatactcctaggccaggcacggtagctcacgcctgtaataccagcactttgagaggccgaggcaggcggatcacttgaggtcaggagttcaagaccagcctggccaagatgatgaaacgctgcgtctactaaaaatacaaaaattagttgggtgtggtggtgcacgcctgtaatcccagctactcaggaggctgagacaggagaattgcttgaacccaggaggtggaggttgcagtgagctgcaattgcaccactgcactccagcctgggcaacagagtgagactctgtcttaagaaaagaaaagaaaatagtcccgagtccttggcctgggatgccttgtcagaggacagtggccagctgggtttcctggtgtatgcctctcccttaagtgtagtttcacctatcttcagtggcaaaatgattctttaatgggagggaggtgaatattctgcctgtgatgactaggaggcctctaggtgacgtttttggccttttctgattcaaatcagaaggtttttattttatttttaaaatatttatttattatgaggcagggtctcactccaatgcccaggctggagagcagtggcacaatcacggctcactgcaaccttgacttcccgggctcaagtgcttctcccaccttagctcccaagcatgccaccatgcctggctaattttttgtttttttgtagcgatgggatttcgccaggttgcccaggctggtctcgaactcctgagctcaagcaatctgcccacctcggccttccaatgtactgggattacaagcatgagccatcacacccggcctcaaatcagttttttaaagatgagtaggcactctcctgtactcttggtagaagtaaaaattgatactgcttttttggaggctggcataagcaaggatattcttgcagcataagttaataccttccaaagaacctagttgaccaaataggagatgctgtatagccattaaaaaagactggatctgtgtgtgctgacagggaaagagcaccgtgatcacagagcatctccgagcaggttgctgaacactgtgctgtatgatcccatttggttttatatacatacaaagtttctggaaggatagataaggaattcagagtggttacccctggggaggagagcaagaagtggttatctctggtgtggggaagtgttgaagatttattttctacttttaattgccacttttttttttttttttttttttgagacggagtctcgctctgtcacccaggctggagtgcaatggcacaatctcggctcactgcaacctccacctctcaggttcaagcaattctcctgcctcagcctcctgagtagctgagattataggtacatgccaccatgcccagctaagttttgtatttttaatagagacaggattttgccatgttggccaggctggtctcgaactcctgacctcaggtgatccaccccccctcggcctcccaaagtgctgggattacaggtatgagccacggcactcagccagttcccacttttctttactgtttgttttctcacatgaatatgtaacaaaaggcatttagggaaaactaggtagcagtattttaactgtcttgagaaattagtataatgatgtaatatctaaatcatcctcctttgcctctgaaaaattcctcttgatggaagcagccacgcctggaaacaattaaccagcgtatttctggctttgtggatggatggatgatggcacccatatggagctttggacctaaactttatgtggataagagttggctttttgtaagatgtatgttcaataattacaaccttctttctccagctgtgtttagtcattactgctttaaaacattttttttttctaaatttagaacgtgctttcttaggaatgtatgacttaaaaactgcaacttgaggccagagtaaggttaaaatggcctatagagtttggtgtcatccaattgccaagctatcttcacagagattttcccattctagggtcttcaagacccctggcctgcgtactccagcagcaggagagcggatttacaacatctcagggaacggcagccctcttgctgacagcaaagagatcttcctcactgtgccagtgggcggcggagaggtgaagtatttccaagggaagccaggccacagtgtgctgcttagtcaagcatttcttttccctgggccctcacccacgcttcaccctcagagtcctttcagtgcgtgggtcctgatctccacacttctgcaggactcagaacccagttttctctcccaggttagaggcccagactgcaaagatcgttgctcagctctgggttctgtttttctgttttttggttttgtttttgttttttgtgggtttttttttttttttttgagatggagtcttgctctgtcaccaggcgggagtgcagtggtgcgatctcggctcactgcaacctctgcctcctgggttcaagcgattctcttgcctcagcctcctgagtagctgggactacaggcacacgccatcatgcccagctaacttttgtatttttggtagagatgggggtttcaccacgttggccaggatggtctcgatcgcttgacctcgtgatccgccctcctcggcgtcccaaagtgctgggattacaggcatgagccaccgtgcccaccttttttttttttttttgagatggagtctcactctgtcgcccagcctggagtgcagtggcacgatctcagctcactgcaacctctgcctcccaggttcaagtgattctcctgcctcagcctcctgagtaactgggactacaggcacatgccaccacacccggctaatttttgtatttttagtagagatggtgtttcaccatattggtcaagctggtctcaaactcctgacctcaggtgatccacacacctcagcctcccaaggtgctgggattacaggtgcaagccaccacacccggcctccatctgttcatcaactaacatttgcccatccgattgtagtaggcccaagaagtagacatggggcctgcccttagaaagcagctcagtggtcaagatgggtttgcaatcatggtacctgtgatatgcgcaataatagagatgttaaagggtggtgcagaggagggcaccaccgaggtatgcgcttagtctagaacccggaccatgagctgtgccttcagctttgtataacttaagggattctgaagcaagctgagctcagtgtctctgggctgcatggagcgagttgctgacctcagcccctgtgaggggaggacggtttgtttcagacatactctgcagggcatttcttagatgatgtgcgtgccttttgtgcccaggtaatccagcctccaccctagtgatagtgctgatgaagtcattgtctccttagagctaatatccttcctgcctgtcttgccacttctccatcccagccattccccaccactaagtgcaggatatcaggggaacctaggggttccggccctaagggccatggccagtttaacccactcccctttctattcagagcctgcgattattggccagtgacttgcagaggcacagtattgcccagctggatccagaggccttgggaaacattaagaagctctccgtaagtctcatattcatctccacacataggatgcctccagtagctttcttgggctacctttatttaggattgtcttttgggcctgggctaatactttctacttaaatttgtgttgtcttccttcccccaagagattttgactcttaccctacttagatagcagcagttctgttcctcagttgatgttgagttttgttcaatcccagggtgcctgccacagaagttccactgcaaaatcaaaattctgcctcattcaggcagttagtgctaggggtatgttaggtcactattggccaccagaaagtgaaacctagagtagctcaagaatgagggtcggggcttgttatcaggaatcttacagaatcaaagagcgagctgaacggccaagcctctggagtggtggggcccatcagctggggcctgtgtgctcatttctctcacacatcttcattcctccctcagcagataaccttctccacaggctccaggttctgtgcttacttaacattgttttgcatgtggctttgagtaaccacacctccaatcccaactttattgctctattgcccaattgttcaatttcttgtcttggtttaaattctgaagagggccaggcacagtggcacacacctgtaatccctgcagctcaggaggctcaggtgagagaaattgtttgagcccatgagttcaaggctgcagtgacccatgatcgtgctgctgcactccagcctgggtgacagagaaagacctcagctctaaaaataaagtaaattatcaatttaatttaattgaagaatgtaatggctccgccagggatgaacctccttggtctggtcagccatcatcttgggtggtggatggagcacttagtgtaaacatggcaaccttaccctcatccttctgtggggtctgaagggtacatccaaggaaggggacaaggcggggctggtttcctaaacctgtctttctgaacataggcccagtgctgagatcccacacacacctagccacccaaatcttgtgactgtcatcctctagctagatctattgcaatgttcttctcaaatctatgatacctttactgtctcacttgagttgttattttactcccttgttcagatgagaaacaggttcagaaaggtgaattcatgtgtgatacagatagagaatggaggggctcaggctgactgtgggaggccaaggggcaagcctgccaagtgacatcttctacaatgacctctctccttttctttttagaaccgtctcgcccaaatctgcagcagcatacggacccacaaatgagacaccaaagttgacaggatggacttttaatgggcacttctgggaccctgaagagacttcttcccttcaggcttattgtttgagtgtgaagttccagagcaaggagccatgttcctctaagggaattcaggaattcagacgtgctattcccacaccagttaggtagagctgtctgttcaccctcccatcccagctgatcccagtcactgcttgctggggccatgccatggaagcttcccatcagtctcccagctgaatcctccctgctctctgagctgctgccttttgcctcctgcaactcaacatcctcttcaccctgccctgcctgcagttgagagggcgaagaagaaccctgtgttctcaggaagactgcctccaccaccgctacccagagaacctctgcatctggcatttctgctctctatgcttgagaccgggaggtttaggctcagataagtgagctctgggccatgagagggtaggtccagaaggtggggggaactgtacagatcagcagagcaggacagttggcagcagtgacctcagtagggaacatgtccgtctaccctctcgcactcatgacacctccccctaccagccctcctcttcctcctcctcctcctcctgtgggaggtggtcagtgggacttagggatctttcacctgctgtgcccagtagttctgaagtctgcttgtggagcagtgttttatgtttatccctgtttactgaagaccaaatactggtttggagacaacttccatgtcttgctcttctacctccctagttagtggaaatttggataagggaactgtagggcccagattctggaggttttatgtcattggccacagaataactgtctctaagctatccatggtccagtggtccctgccaagtctgtagacttcagagagcacttctctcttatggggttcatgggaacaggggcgggtgtgacttgcttggtggcctcattccatgtgtgcctgtgcctggggcatggactttgttaagcagagtcagcagtgaggtcctcattctccagccagcctctctgccctggagaatcatgtgctatgttctaagaatttgagaactagagtcctcatccccaggcttgaaggcacatggctttctcatgtagggctctctgtggtatttgttattattttgcaacaagaccattttagtaaaacagtcctgttcaagttgtattcttttaagttcttttattctcctttccctgagatttttgtatatattgttctgagtaatggtatctttgagctgattgttctaatcagagctggtacctactttcaataaattctggttttgtgttttcttttgtaa

SEQ ID NO: 1238 - DNA, 442 bp, Homo sapiens
gcagccccgcgctgcgcacccagtcgaggcgccaacacgcgaactgggcgggagtggccggcccgcgggggagcgaggaacgacagggttccccccactcgctgcccagactggccgcgggatagcgcgccccccccaaagcctgcacccctgccctgctcctctatcattccgtcccccttgctctgtcaaaccctgccggggctgctctgtctctgccgacccgccacttgcccgaagttcggcctgaggagcttggggccctgaggagcgccgacgtaggcagccagccagtcaatcagtcagagggtcacggcggcccctcggctactcagtggcagccaggccagaaagaagcagccgccaaccctggagcagaatcctacagccgacctgacctagtaggcccccagccctccagagcttggggtattgcagagcc

SEQ ID NO: 1239 - DNA, 638 bp, Homo sapiens
acatctgcttttctcagatgtgaaaacctttgctttgggcagattcattctgatatctgaaagaggggcttactacaagatccagagcatcggtaccttcaacccccagcagagcgcccccaacaccttcattccatgagctagaaatttgtgtctgggaggacaacacctagggtctctgtaatttcccagtatagtagacttttcttggccaggaacaaagcggggcaagagtaattcggtgatcatgagtctcacttcccaaagtttctgaggccctggcagatctgccttcccggaactctctaggctgaaaatgatcaacctagagctaatgatgcaagagggttctgcctaaaagaagacaacctgggggcatacttagccaggttattgggtattgacaatttatagactaggaatcttctggtagtgacagcatttggaagaatggttactcagtgcaaataagcaacccagactatatgtcatcaggcctaaagagcctgacaccaaggaaacacttaggatccaacctgctttacccagaaccaggttcatcctgtttcattccatctgcaccactgcctaaatcacctagtaggaaatgcatgttatgtagcaggtgcctaattaac

SEQ ID NO: 1240 - DNA, 472 bp, Homo sapiens
tggagatggttgtgcagggagagcaggaagggagggagtcagggtggacactagagggagggtagagagaggagctcctaaggcagactgccaaggaagttagagaagcaggaaagacagatccatcacggaggacaagggaggagagaatatatggaagataaggagtgattcttgccagggacctcccaggccccaggaagggagcactgcagggtttgcctttgattgggcacctgggacgccctgagtgaccttcacagcagccctttatgtaaagtagtggggtacaagccaggctgcaatcagttcaaaagagatttacctttaatcttggtcaaaatcctctattttgaaaacccagccagtggaagtccttattcaattagttatgttctgaactttttaagtcattgaattctgagatacaccttattatatttagtattaactatccaaagcttgttcttaa

SEQ ID NO: 1241 - DNA, 638 bp, Homo sapiens; identical to SEQ ID NO: 1239

SEQ ID NO: 1242 - DNA, 1044 bp, Homo sapiens
gaagagtcagccttcttcttttcctggcctaggtagtagagctcatatagaaaaagtgagacaatattggtaccaaactacattatttattgcttccactgaactggtcaagaggcagcaggtgaggcatgaagatgggcagttctcagaagttttcctgaacctacaggtttatgttaatttttttatgtataatttgtcttccttgtttatgatctcattctagtctgccatgtaaccccttctcaaactttaaaaggacctcccttgagctggagctaacgagaccatttcttgtctgcttacaattttaaaaaaaaagctatttgcaagtaatttttctcattatgatgctgttatcataaagtgagattccagtagccagggtgtcaagggatggtatatggacagtgcaactttgacttactttactctacttagtcaaattttaactattttctggttcctttcatttgaatataatagttaaaataatgcagaccattcacagttcatatgttctccctttgtttttctctgactccacatgcactgacatgtatagtttctgctgaatttattaatttggtccagtttattcctgctgttaactttgatttcttttcctcctcttatctaatatttttcactatgatcagtatgttccatgaaatatatatattccttatttttctctcctaaagtataaacaaattgtcattgggaaaggagaacacttttctctgactcacataatgtagtagtaatcattcatattttacttatttgtggctgcataattgtaataggaagagtgtgtggccaggtgagcgaagccagaaaatatgttgcttggtagtttttccacattgctctcaaattttcatatattttgcttatttactggcccgtgtgtgacagtagtcacacaaatagtacctattattgtctaacttggggatgccatggggaaggtgtagattttcttggcactggattctgcaacacttgattaatcttaattctatggcaaaaaaaaaaaaa

SEQ ID NO: 1243 - DNA, 1047 bp, Homo sapiens
gaagagtcagccttcttcttttcccggcctaggtagtagagctcatatagaaaaagtgagacaatattggtacaaaactacattatttattgcttccactgaactgtcaagaggcagcaggtgaggcatgaagatgggcagttctcagaagttttcctgaacctacaggtttatgttaatttttttatgtataatttgtcttccttgtttatgatctcatttctagtctgccatgtaaccccttctcaaactttaaaaggacctcccttgagctggagctaacgagaccatttcttgtctgcttacaattttaaaaaaaaagctatttgcaagtaatttttctcattatgatgctgttatcataaagtgagattccagtagccagggtgtcaagggatggtatatggacagtgcaactttgacttactttactctacttagtcaaattttaactattttctggttcctttcatttgaatataatagttaaaataatgcagaccattcacagttcatatgttctccctttgtttttctctgactccacatgcactgacatgtatagtttctgctgaatttattaatttggtccagtttattcctgctgttaactttgatttcttttcctcctcttatctaatatttttcactatgatcagtatgttccatgaaatatatatattccttatttttctctcctaaagtataaacaaattgtcattgggaaaggagaacacttttctctgactcacataatgtagtagtaatcattcatattttacttatttgtggctgcataattgtaataggaagagtgtgtggccagggtgagtgaagccagaaaatatgttgctttggtagtttttccacattgctctcaaattttcatatattttgcttatttactggcccgtgtgtgacagtagtcacacaaatagtacctattattgtctaacttggggatgccatggggaaggtgtagattttcttggcactggattctgcaacacttgattaatcttaattctatggcaaaaaaaaaaaaaa

SEQ ID NO: 1244 - DNA, 1047 bp, Homo sapiens; identical to SEQ ID NO: 1243

SEQ ID NO: 1245 - DNA, 3640 bp, Homo sapiens
caaggtgggggattgccagggggagaaaacttatttattgctgtaagacaggacccctcctcccaacctcataccccaccgcacaccagagctaaattcaaagctgaaaggcgcacgtttctatacctacattcattcctgagggaccctccagagggtcaaggtcccagccccaggcagccctgtcacagtgagaagtagttcctgtccttaaggaatttccttctaatccaggtgcttgggcaggaacccgatggccttcgggtcaccaaggctgtctgggagggaggcacagggccgccctctgtgctgaggccgtggaggaagccaggaggagggtggcttgctttgcttccttgtctaattagcttgcttgaagatgtggccttggcagggagccagacccatggggccaaggaagaggaagagcatcctcaatagactcactcccccttccttggtctccacgggccccgtggactgagggctgcattggggtcttctgcctaggggaagtgctggacctgagctggagccacttggcttagaagccacaggattcacttttcactggcctttgcagtccccaaaggatcaggtctcagaaccaaggctccaaaggctgaggtctccccagttcctcctctcagaactcccacagtagctcagaggccgggggtcctgccaactttcatttggaaagttctttcgaacatctaaactagatctatcttagggtttctttctctcctagataggatcagctcccagccctagccattaggctgctggtcctggcgggggatggggtcccctcgttacccagtccttcccagggacccaacttcctaacacaacctggcttggacatgaagaccctcccccaggttaccttgtaaagagtccctccagagctgggatcccatgggcgcagcagcacacccagctcccatgcgtcactccctagctctgtcccagcttttgctatcattgctgacttttcctcctgtggctcatctctgtccctgctctctttgaaaacctaaactaccaaggtgtcatgctgcaactccctgcccagtcctgcacaaagccttggctgtgtgtggcaccccttgcctcctaccccagagcagctggctccattggcttctccctgcaccagccctgtcctcaggggtcaggaaaaagcagcacagctttctttcctctcctccagaggcctggaagggaggtggaggtccagtaagggcctggctgccttggatttcttggtcctgccttgccaactgcaccctgtagctcctgctccctgtgaccccagaaccagaggtgctgccttccctgtctcctagacaaagcacaaagggatgccctgcttggcttgagcctgcccaactgaaggattttctctgccccagggaccttccatccctgaatacaaggctctaggcaacttctctctgggtggtacacactagaatgcctggcattagccctagaaaggaggttggggtgtatgggtagtgagctagggtgggagaaaggtggtgctgaaaggacagatgctagttgtagtttcactcactcattcattcattagtgcaacagtactgagcaccacctgcactagaggcagaggggtgaacaagatacccttctgcctggggggacgtccacttcccatgggtttggctatttccaggaaagcccctcagtcctccaccctgttctggctgtgtgtgaaggatgtgtgtgagcaggcccaatcctttgcagcaagaatgagaggtcagagtattccattgcacacgcaccctggggctgacagacttgtgccccctagccttcatgcatgcccaagcactggcagctttgcagcccctgccccaccagccccttgacgctcttcttttgttctctcctcggggatgagctctgctgctgagtagggagcttttgcttgctgggaggctctatgcatggatttttttggtgaccatacagctagggctgaggatgggaacagggacagagggcctggctatccctagaagcacttcatccatctttacccacccaaacgggatcccttcacatctcatacccagtaagatgcaagaaaggaatatctgagagcaagcagccctgctccaggggccccaggtatgtgtagaggcccagtgggggtggccacttggtgtttctaccaccccctgccatccagtctggccccagtacctacctgggaggttggtgtacttggcttaagtacttcatgctttattcaggctgcttccccacagcaccggcaggaaatgaaggtgcacttatatgcatccctgcaggaataaagagtgggtggcctgcccagcccagcaccacagcctttccccagccaggagagaccacctaaggatcaaggcagctcctgttttcttggttctgtgacactcgagtctgagccagcccctcaggaattgcctcaaaagagaaaaacaaaaaaaagtcctccttcccaaggcctgctactccaaggtttggctccatcccttgcctttgggtcctgcctatttccccactcctggtctcttatctttggggccaccagtggggagtcacccgggccccaatccctctaaggcgctaagttgaaggaggccttcccagagtgactattggtgccaaagtcccagttcctgttggacttggggtaaaaacaggagatggtgagtgggtgtaaggcccaaatgcccagagaagttaactcgaacccatgggacctgtcccagcctgtcagtccctgatgagtgtaacttccttcccctgggggcctggcccttctctccaacccagtggccatgctttctcacccagccttgtgcccggcctgcatttctgtatatattgctgtgtattgtgtgtatgtatgtattcctggacaagtgtgttcatctgcagcccttgcctgaggataaggtttaggattgggtaaagatcagaataccagggccagctaaggcaacgactccctccccaaacccttgggacctcagccagtcccaaggctgccctgacaatcaggcaggctccccaccgtgagccaagcctcctctgccactgccagcatggcccaagggaggcttggccttgcgcttgccagcctcagctctgccctgacaagggtcttgtatccagggcagaggcctgaggtgacccaggcttgctttgtggctgatgccagcaggcttggttctagtgggcaccactggtgggcaacctccataactggcccttaggcctaccttcctacacagctaggctataatgggcctgagtgagagggtagcttccccagccccaagcacaggcagaggggtggagagcaatttttggttttatttttgtttctgaagtggtgcctgtacctccagcccccaggggccttccctggccacacttctctgccccacccaggcatcgccatcccagcactttgctccatgtcacccgtaagatgccctttgctgaatgtacctgagtgtatgtatttaaaaggactcacatgggcatcagagaatttatggctctgtatccaataaaaaagatggtgaaactggtctatctgccccagagaggt

SEQ ID NO: 1246 - DNA, 19447 bp, Homo sapiens
aatttacaaagttatctgaagtcttacattttatttaaatagcctccagtaagaagagagtgggccaattactaccccttccttgtaaaatgaagtaaccaagccaaggagggtaagtgcacccagcagccagccagccatgtgatgggtggggtgcctctcagtgggggcggccacgacacggccccggcctgctgctgtgggagcatccacagtcgagcgggggttcttgatggtttcatctacagacacgatcaggcacgcagcctcagaggctgctgtcagcgcattgatccgcaccatagctggctcccacacgaaagcttcaaagttgtcagcaatgtcctcgttgttgatgtctactccataccatgtacccccctaaaagagtaggaaaagaaaggaggtaatatggaactactttcaactttcctcttgtaaactggtactccaaaagacactgctaggaacccgcagactctctgaacttggtggcatttcgctgaagaatactgcatcttcctatgagcatgccaggaacctggaaacacccctactcccgccaactcctccccttagccctggacataccacacaagacctctgggatcttctcccaggcaagctgttgtgttttggggcggccccatcctcaggtcacctgaggactatatatatatatatatatatatatatcaaacaatgagttctcaagataaacaggaataacaaaaatactatcccatctttcatctcattgcttcaaatagcccgattttacagatgaggcaagtgagacacagaggtaaagtgactttaagcaaaagtcctaatacaagccagaagcagggtcattcactgggtgctaagcacttaacaaacctctatctatttaacaaatggagaaattaaactctcagagaggttgaagtaactagcccagggtcacacttgtagggctctggagagcttcaccacaccagtaagcccactccatgtggtcagtatgtgcttccaggaaggtggatgcaaggttcctcctgtggtaccataagaagcaatcatactctttttttttttttgagatggagtctcacactaccacccgggctggagtgcagcggcacgatctctgctcactgcaagctctgcctcctgggttcaagcaattctcctgcctcagcctcctgagtagctgggattacaggtgcccaccaccacgcctggctaattttttgtatttttagtagacatagggtttcactatgttggccaggctggtctcgaactcctgacctcatgatccgcccacctcggcctcccgaatgttgggattacaggcgtgagccaccgcacctggccacgatcatactcttggtagaagcaatgaagaaaccctggatctcctgtgctagcaccatggctttccttctgccctcagaggagggagttggtcaggcagacaggctggggggagttgcagcctatctcctgggccaggcgtgcacagcttgagtaagcacagctcacattcagaatctagccccacccgcccaaaccctgaaccctggggagagaaaggacccacctgggcatgccgagcccgcagcttgttgagaatgtttgtggcatcaaagccagcattgtcacacagctggcgtgggataatctccaaggccttggcatatgccccaatcaacagctgctgttttcctggaatagtccttgagtaatcccgcaggtacttggagagttccatctcaatggccccgccaccagccaccactgaatcattctgcagagatcagaccacctctcaatgtaagagggcccctggtccaagcttccatgctgggccactcagtaggtcccttcagcccagaaagagtggttcttcattccttcctccatcccaagccccaaacgcccagacacagcccctatctagaacatcccaacttcaacctggtgaaccttatggtttctgactattttcaaggtcacctgcagctcaaggacactggcacaattactggaatatctgactacattagctccagtttgctaacaaaacgaagtctttttcttctgcttgctctgttgcccaggctggagtgcagtggtgtgatcatagctcactgtaacctccaactcctgggctcaaggcatctttccacctcagcctcccgagtagctgggactgactacaggcacatgccaccattcctggctaatttttttatttttgtagagacaggatctcgctatgttgcccaggctggtgtcaaactcttggtcttatgcaaccctcccatctcggccttccaaagtgctgggattacaggtgtgagctaccacgcccggctaaaagaacaagtcttagctttcaaggcaggatgacctatttttgagaaactgaggctcagtttctctaccatttgtggggcaaatcagggctcaccacaccacccaggaaagggcaggttatatagagaaggaatcaccacacaaatccaaggtctgatcagctagggagataggagagagtaggctgtgcaagcaggaggatatcagcccagtaccttgatggccctcctgacgatcatgatggcatcatgcagggaccgctctgtctcctccataaactgctcggcgccgccacggagaatgaaggtgcatgtcttggccttggggcagccagtaaaaaaattgtacctatgcccaggattaaacagtacacacatgaactcttgtctgccaccatcctactgtattgtcctcactgccagcccccccaacactcagcagctgctcttacattcttcactcaggttacccaatcccaaccttatagacattttcttggaaaggtctgcagctgtaccactagggcataaaagattgtggagtcaaggcttttagatcttcctgtaatcctgtatattatctgagctctttatggctcaaaggtgagactctgtaaaagctgtataccactttgtacacaaaggtgagactttgtaaaagctgtataccacagccaaaagatggcagaagaccagacccaggcaggtttgtgagctcggcctgggcccacggctcacctctcgcctccaatctgggtctcttcaaacacctggcatcgacccagcacatctgctgacagagcattcacactggtctggattgagcctccacaggcctagggagcaaggaaggcaagatctagcagtgaaggttcccgaggccaggcagcttcctgccacctcgtctcaaagccaattcccacgcatgcccccagagcctctacattacccgccctttcccttgacttccaggcgacccttccccctctctgaaagagcaaaaaaaaaacaaaatagaactaaaacacatcaaaggcaaacagaagaagttaaaaggagatagggacccattcaattcagcttatactccctcccctaaactagggtggcactgggtccagcaactgaactcaggagtactttaaacctaaaagtatcttttgtgggatgctcatgaaagggaaaaaatctggctggaagaatcaatatttgagtttgtccagctaatcatagcattactgctaggttctctcacaaaccagatttctggacttgttttggttagactaaagtagtttgtgctactgggcacacacacatggaaatggaatgtgtcctggaaaaaaaagagttaaaaaaaaaaaacagggctcaattcacacgccaacctgacagtacactctgttataccaggggtcagtgaaaacccttcagggccacaaaggccgagaagcagcctgtgaaaatctggttaccatcattgtcctcttcagatcctcctcaggtactcggccagcacagaacatgtccctgtcagcaaagtactgggtggccacatccccaatggggagtttggacaagacaactttggctccagaatgatggatcttctctaacttgtcatagagaatgttccactcagcatcaacaattgcctgataatcctggagagacccagaaaaggatgagaatgctttggggtgaaggttgacatatacggtagggtaaaatatacccatctgcccccaccaaataaaacatgctgattcatctgggaattaacagagataaacagaatagctactcctcagtccaagcaaataaggaccccatgagatgacttaggaatcacctgaaactccccaacacaaaagcagaaagtaaccccaaggctgagaaccacagctggtgctgtccagatgcgagaaatagtttaaactggctgaggtctagactcttctgaggtgctggattcatggagttcccaataagacccctttggccgggcacagtggctcatgcctgtaatcacagaactttgggaggccaaggcaggtagatcacctgaggtcagaagttcaagaccagcctggccaacatggtgaaaccctgtctctactaaaaatacaaaaaaaaattagctgggcatggtggcacatacctgtaatcccagctactcagaaggctaaggcaggggaatcacttgaacccaggaggcagaggttacagtgagccgagattgcaccactgcactccagcctgggcaacagagcgagactccgtcttaaaggaaaaaaaaaaaagaccccttccccaagaactgctcaaaggtgggtgacatggctacctccagaggtagcctgggtaacatcaacaatgagagcacacctgtctctgcagcactaggtctagtctagaagtggaggaactcacacttgcaccaacaagaggaaccaaaataccgggcaggctatgtagctagagagtccctgccatccccttccccaggaccacagcgtatttcaacaggtgttccctatccaaatttcctcaggtcaaggtcactcagggagaacacagagtatggaaagaagggggcctagtacttagacatcaatattcaggggggcaggaagagaaaggggcccacaatagccatgaagacccagggctctggctcagaaagctgcccatttccatgcccccaccaactggtgaacccacctacctcaactgtgtggactcttatctcagcattgtctttctcagctttcaactcgagctcgacattcaaaagggcaatcttgggattgtggtactttttgggttgcatttcaaacccagcgtaagagaaagtcttcttgaatgcaacaccagctaccagctgagaatcctgttttaaaaaaacaaacactttaatggtttggtactaacatgaaataaaatcaagctagttgtttgctggctagtgcttatccattcctgtgagcctgagctaatcatgtctttatttcactgctgtaacacagcctttctgttatcataaaatcgaagacaaatccttttttttttttttaaataacacaacatattatttcagtcaccccttaagcataaggaaaatcatctggttagcagaggcaaagcatggtaaaggcctactgggctgtcctctaagactggcctctgcagcactggccgatggataatgctgtacaaacttccaaaaagtatgccagaagaggagccaggtgtttacaaagaaggcaaaacaaaagctgtgcaatgctaccctcttctatgccccagctcccaaatctcaagtatcctcctgtacacctccatgtacccataatttgcactgcaccctccacccccacacccccaacagcatggatactatagccttgacgcttcctccctccagaagatgatgccaaaaggtcttaagaatcagaaatcccctgcataatttctaagctatcactgcagctcctcagacctcaatccctcaaggtagggatcttctaccacttgttctgcaacagagcttctctgtgggttggatttaacagcagggcataatagaaagcacactgcacccagggctgactcagcactaccgtgagacttaggttccaatctcagatcttttccttactaaatgaccgagtcatttcccacaccataaaaaagggtattcagttcaataacctttagtttctctgccagtgctcatctacaattctaatctataatactgtaacccatgggtgaagagtatctgtccccagttcctgcatcattcaaatccacagcttcctaaagggagtgatgcctgagctgaatgacagatgagcagaaattagtcaaagagaaaaaaggaaaaaaggggttctcctaagaggtgggaggcagtgttgtggaatcagagaatgaaaagccatttgaagttgctagaatttagagggtaagaaccagccagtgaagaagagagaggggaagtaggcaggggccagtttagaaggatcttacaggctttgttaatgcctggctttgtatagggaatgtagatatcagaaggctttacgcagaagaataaagtaggaaacttcaccctgcaaatagtaaataagtacaatggatttaggggatccaagactggaagaggggtggcaatagtaccagaaagagtaaaagagacagactcaataaataattaggaaatcacgaggtaaaatggaacaatggtaattgacaggctggagtcagaagggttttcaaggatgatcccagatttctggtttgagtgactgaataaacggtggtgacaccaactatgacaagaaatacagaaaatgctatcacaggagtggaggacaagataaagcgtttaacagcagttagacacaagaaagagcatgaggctcagaggagaggtgagtactaaagatatggatcagaaaattcccagttaaccctggtaacaagtaaataatcactaccactatttattgaattctgggtcaggtttgtatgtatttaacgaatgtaggacagtctcggaaaaacgcaagtgtggcttagagtccctggctctcttgccaggtaagattattagtcctgatttctaatctatgtagattagaaatggatgccatttctagattagaagtggatgccaatctaatctcaaccatttatggaagtaggaaggcccaagagaagatgaaaaatcgctactaaagcagtgagtaaagacaaagtcagcaagccatgatgaagatagggaaatggctcagatgacctccaggttcctcacagctttattacatacagagaatctcagcccactggtctgacatgtgccacaataggaggggaaatggcaaagtgggaatgcaatttgggagggtaaaatttaaagagaagggccaggctatctttcaagctggtcctcctctatccaaatcgcttcagttgaggtcactgacgaagagtaataagtaaagcaggccagagactgaaaaggccaaaagcagcatggagataccaaggacgtttccagacagatactactgtgttaaaaagaaggagttgtgctgtccaagacagtagccactagctacatgttgccatttaaatggaaataaaattaagattcagttcttcagttacattagttgcatttcaggtgctcagtagccaagtgtggatggggctatcatattggacagcgcagatatgtaacagtcccaccaccctacagaaagctctactggagggtgctgagttaagagctacacacgctaatgtggatcaatttctaaaatatgttgttgaatggacaaaagcaagctacagaacactatataagcaatcttttgtctttaaaaaacagtatttacatacatgttcatatatgcacaaagtaattctgcaaggatacacacaaactaatagtggctgtatatggggcaggggtagtgcatgaaacacttttaactttaggccccttcacagtttgaaatatgtatcatctattcaagataaatgaatgaaagaagggcaagcttaacagtatcacttaggagtaagcagtgaactgaaaaatccctctcagatgtattaattgggaggtcattgatgatttgagctagtcctactacccctccaccacccactgacacagagaacctgagattctgaaaatcatacagtccaattttctactctgctgacaaataatatccacagaggttaccaagttcatctagtaacagcctctaatggcagtatggaaagtacaatgtaagtctgacttcctgcctaacatgcattctctttattcctgtaatgagtacccctctgccatatgaagctgtctgaagggtcaatatgaaagcaagagctgtctaggaaggccacagcaggcttacctcgagggctccaccctgtaccttcttgattccaatcattttaagctgcagcaaatcatcgagcatcatcactgcatccaccaccatcttagcaaagaaagctttctgctgggagatcagcttggagctcagagcggtcatggcacacttttccagcagcttcctctgctccctgggacacaagggcagaatctgcatcaggtcttgaaaaccaaatccctcttatctgattctactacagtgtggaggtagttcccttccagtctctaaactcagccctctccaacttcaccttttgtatctttagggcagattatcagtgacagatggtgactgcagtcaaagatctcatatgtggcagcttttaaactacagtcgacagcttcttttgtgctctgtgggctgggacacagccaagggtctggcaggagccaaacagccccaggcacatagagggattgcagcatgcttctgcatccaatttggccacaggaagtcagtcaaggttctgacaaaggcctgacacggtgactcacacctgtaatcccagcactttgggagtcgcaggtgggagatcacttgagccagtagttcaagactagcctgggcaatacagcaaggctccgtctctttaaaaaaaaaaaaaaaaacccactacagacttacactttatctgccttcttcacggtcacagcaatctctttgatcttgttaactgcctgccaagaacagaagttgaatgagtctctcatgctaaagacaaactgctgaagtggacctcaatctctcaatagtcctgagtctgttcactcccaaatcctaagcatttctactctacagctgaaaaaacacttctaggtcttgtaactgctcagaaaaatgtaaaactctatagttcagaaaattccaagtcagaaatgcagagtgggtatacagttctgaagaatcagggtgcttccaagattttgctctgggtctgcaggtaacacgctacaacgaatgagtggaaacagctgtgacacgagattaagccaaacctcctggtttactaaaaacacctacgacaacttctagcactttatatattagttatatataaaatatgcatacaaatatataaactttttatttttttccaaagtactcctcatatattatttcattttaatgtcaccactcaaattagagatagcaaagaaagtaaggcctagaaagattaaatgacttgccccagatcacaaatgaaggttagagggcaaataatagctaggtctcaatatacaccatgaggtgcttgagtatagcatgtagtagtagtatgccatgagtctcttagtccttactaaaagactatgtctacatcatagtctaccaggctgactctaacctgaggcttaaagagattaagtaatacacctcatcaaatggctacagattagtagaactgagattactaaggagatgtcagaaaatgcccaaagtaccctgttccccagtccctccacactcctgaaaagaaattccccttcctaagagaaatgtgaaggtgtccaggcccaagagaaggttaatcagtactgccataccagctgggtggctgtgcggaaagctcgaatgatgatctgggggtgtaaaccttcctccacatagggtttcacctgcttcagaaactctgcagccagcaaggtcactgaggtggtgccatcacccacctggaagatgatgacaggaaatacacgttttctgatgttcagggaataaagccctgaaactccatttttaggcacgctacccatttaaactgcatattatttaaatggatgtcaagcttttttctggaagcacaggtttttgcaataagtagaaagaagctaatggtagttacatatccatcatgtcaaacagtcctgggctaccaaattaattccccagacagccccattctctaaagagggctgatgtggacaatcaaatgtcctcagggtaaaaaattacacacatgaactgagaacttatgttacgtacaaggcattgtgatgaataaaacagtccttgtcatgcttattgtaatacaatacttaaaataatcatggtaccaagaagcaagagacaaacattgtttaagaagcaaaaggtggctgggcacggtggctcacacctgtaatctcagcactttgggaggctgaggcaggtggatcacctgaggtcaggagttcaagaccagcctggacaacacggtgaaaccctgtctctactaaaaatacaaaaattagctgggcgtgatgcgggcgcctgtaatcccagctactcaggaggctgaggcaggagaattgcttgaacctgggaggcagaggttgcagtgagccaagatcgcaccacagcactccagcctgggcgacagagtgagactccgtctcaagaagcaaaaggtactgcaggagttcctttcttttttaatagagaaagggtctccctatgttgtctagactggttttgaactcctggcctcaagcaatcctcccacctcggcctcccaaagtgctagaattacaggcatgagccactgcatctggccaggagttaaaaaaaaaaaaaggtaactttcagtcaaatcacactaaaacaaacgtcctaggaccagccaaagttctttatatttcaaaaactatgaggaggccaggcacggtggctcatgcctgtaatcccagcacttggggaggccgaggcgggctgatcacctgaggtcaggagttcgagaccagcctggccaacatggtgaaaccccgtctctaccaaaaatacaaaaattacccgggcgtggtggtgggtgcctgcaatctcagctactcgggaggctgaggcaagagaattgcttgatcccaggaggcggaggttgcagtgagccaagatcacaccattgcactccagcctgggcaacaagaatgaaaccccctctcaaaagaaaaaaaaaaaaaactactgggaataagcagattactagtctgctaatcttttttagatggtgcttttctgtgatgggatctaaatcctatttaatgagggtgaaaaagaaaaagagctttctaagaaaattggataaactctaaactggaagaaatttatttcggtagagatggggtcgtgctgtattgcccaggctgatctcaaactcctggactgaagggatcctcccaccttggcctcctaaagtaatgagacacaagcatgagccaccatgctcagcccagaaatttatttttaacttcatgtatgttcactgtgtaaggtaagaaattctcaaggggcaaaaaaaaaaaggttactatagagaaggtttaagtgggcagatttctggaccaaaaggcattattccctcgttgaagacaaaaacaaatcaaatccagactcttctctctttaattttatatatgctatacctgttttataggcttggctcctaataaaccttttaacgtaacttcaagacatacctgtagtatacatattttgcagtactctaaaatacaaaacctatctgtcaacacatttattaatactccagtgttagaatttatttttaaaagatagactggttaatgccatgaattatacacttaaacatggtattaagaataaatattatgtctgttttatcatcagtttaaaaaaaaaaaaaaaaaagcctggtgtagtggggaatgccagtagttccaacgactaaggaagctgaggtgagagaaggcttgagccccggagttcaaggccaacctgggaaacatagtaagaccctatctctttaaaaaaaaaaaaaaaagaaagaaaggcagattggaagtcttagtttacagccccattttgtaagagatgagaagtcaaattatttaacctagcaactcacacaaatgacagcacacaacctgttaagatctcaggcagtagacttatatctaaagactgttgtcattcaccaatgtattaatggatatgaaaagctacatgtaacgaaatagtatgaattttaaaaggctgttaattctaaatacttttataagcatgtattacttgtacaattataattatataaaatcttaaaaaaatttaatagaggagaactaaggagcaagcaagcatgtgtttcaacctccatttaaacacacaactattttcctacctcagcatcttgggatttggcaatgtctaccaaagtctttgctgcaggatggacaacatcaagaagtttcagaattgtggccccatcattagaaattgttgctttgccttaaaagaaacaaacaaaaatctaaagcccctttcttaaatgctgtcttcaagtgggacctagaacccatctacactttactgggatggggcagaggggatcacggcagggctgaagggaaaggatacctatctgatctttctatacagaattagctctgtacacaaagggtctaaaatcacaagcttttgcagaccacagactcccaattttccttgaagagcaattaatacaggtcaactggatacagaaaagattttttaaataaaagtaaccacttagatattcttaccacagttgataccctcacacatcaattaatataccaagatataaacaggaattttctcatcttgataacaatggaagtgaacacaggaaactccagatggttctatttcatgtttctaggccacgtctccctatgaggcaacaggctcctgagcctaggttctctcatatagtcccacacgggctcagcagtcaggacaatataagaattggaactgcttcagagtgagtcatctttcaacgatcttaaaagcagtgggatttctgataccaacctatgctagtcccaaacaccccctcaggagcctcctttcctgcacacaggcctgaggaactctgtagacttacctctgccatctacaataagcttgtccatgccacggggacccagggtagttcttacagcctcagcaatcacctggcaggcactgatgttactcacaagctgggggatgccttgggagctatcagtcccctctttcaataggataactggtgtgggctagaaaagaaagaaattaactgcttttaataatcatctattataatgagactggcaggggaaaggggaaaatgctcccatctctcccttaacagaattatctagaggtcttcttaaaccacattcccccaactgtctaccacatccattccccaaccagcctctacctccagagacactatcaaatttagcctaccctgcaggtatgctagacaggaaaatggtttgagaagcactgacctaatctaaaagaaaaaatcatgagttctccagtacccagctgaatgaccatggccttttcaacttctgaccttactccctgtgctgaggaattgggtcacaacacaggaggaagaggcagaccctgctaagtgttcattccgcagcaaaacatccacttgtctgtgttacagctcaatcttagagaagcagatgggacactgatgcaaaatgcaagatgccaagagcttgaggtgttgtcctagagatgcctaggcagtcagctttatgtaacagtgatgttcagctgcagtgtaggaaaacaggcagagaaacaaacagcacctttgccctgttttgaaaaatgatggcaaatctaattcatacagcaatgtttccatctctcatgctggctgaataaagcttctgtgtgactaatttccaatcagataccccaaagaagttttcctctttctatattgcattggtctccagaacattccctatccccgtaagggcttcatttgcagacctgctttagaaactgagaaacagggatacttgcttgttttaaagggcccgctcagatatctttgctctagtgaccaccattattagcagagagagcaatttctcagcttagcaaaccagactactttctctccacattcaaatctgagccttcagagataagcccacgaactagatccagtcttctcaagtgtttctggctaattttgtgtgtgacacagaatgtagtaaggataaatactatttcaaaacttttattgtgttaaatttgttactaggctatgattaaaaatgtatttcttactgtggaatgcaataaaaagtttgaaagccatcacctagtccttagaggtacgtggatgtctgagcaaggaaggcacaggaaagcacagagctttcccaacctaacaatgaggagtgaggaattcctgccaaagacagagtcttgccactcatgaggctgattccttattaactggtcaattccttaaaaagttcaactcttttggccagcgcagctggagggtagtaagcaagaggaagactggaataaagctgaagaggcaggcaggaaccagatcacatacacactcgtagacacactatggtgaggagttcagatttcattcctaaaaaggaaagccctgggaagctttcagcagaggaatggcatactgtgatttacataaaaaacaaaaaccactgtagaaaaaagaggatcacttgagctcatggagttcaagaccagcctggggaacatggcaagaccctgtctctacaaaaagaaaacgaaaaatacccaataaactctacggaataagagagtgggagtaatttaatatattattcattttttaatatatatttctaagagacagggtcttgctccaccacccatgctggagtgcagtggtgagatcatagcttactataagctcaagcctcctgagtagctggaccgcaatgcatgaggtaccacacctggctaattttttaaatttgtatttaaaaaatgttgcccaggctggtctccaactcctggcctctaacaaccctcctgcctcagccttctgaagtgctaggattacaggcatgaggcaccatgccaggccctcattaaatttttttaaatgcttgtcaaataatcatacattactccttttattttttattttaaaaagaatgcttgtcatgtaaacccctacatttgggatcaggcgtcaactgaagggaaaattccttccttttgctggagtgtcccaggtctggtggcaagaaatggcttctctatactcccagcattctttctggctcttcagctggcccagtccctggcaccttctgtaagggaaagatgtgtgtcctgaaaggccctaccatctcccagtcttgctaaatcattccttatggcagccccaagtcttctctggtccacccctgccacggatggagtcttacactttaaatcaaaaactaacatgagtctcaatcacttcctatcaccttcaacaggttctttcacctcaacaggttaacttacccaatgcttgtgtatactttttctcacctcaacctgcaaagtgtacccccatctaaaatagtcactctgccatcttctaccaaaaccactttctcaccaccaggccaccaattcctcagagctccaattcttccaagaagttttctctacagtaataaacaagggcatctgaataggggaatcccataactttctcttcacttgcccttgctcgcaactttttatcaccatccagcttaagtacaagctttccaaagacaaggaccaaaataaccttaatttgaagagtgccaagatttggccacacatgaagcaatattcagcagcttttggggctgaaaatccaactgctacttgtaagtgcttgacagcactggcttcttgacttttggggagaaaagcactggcactacagtaacactacatttactgagagttcttaagcacaatgcaagaagagcttggaagcagctaaccacagattccccaggttccctatgctttgcaggccctgaagaaacagcaggctgggtagagagcatctatggggtggaaaaggtggcagagctggattgagtcaagccaagacaagcaggataggtcctcttctaacagttccccagcagcaggcactgtatgcaaagtccagtttccatcccttagttactttcaacctcgctccttttttttattcctctaataaataagaaacaaggtcgggtgcggtggctcacgcctgtaatcccagcactttgggagtccaaggtgggtgaatcacaaggtcaggtgttcgagaccagcctggtcaacacggtgaaaccccgtctctactaaaaatacaaaaattagccaggcgtggtggcgtatgcctgtaatcccagctacttgggaggctgaggcaggagaattgcttgaacctgggaatggaggttgcagtgagccaagatggtgccactgcactccagcctgggcaacagagcaagactccatctcgggaaaaaaaaaaaagaaaaagaaacaagagcagactccagtaattggccacaggtataatggaaggttttggaatttcagcttactgatcttcctcttcatcctactttaaaactttcactaagcatcattaagcttaatggcttacaaaacaagtgtgtctatgccaaggcacacagcgctcaacgccacaaaggcaaggacatacattttatgcaagctgtaccaacatcacaggactgaggtttcaggggaccttttcacctctctttcgattacagaagtattctagaatatcaggggccaatttgaagacaggaagactcttggagatagaagtttcacattccaaaaatggggaggagatatcaagagccaatacagcagggaaacgtcaatctgacagaggaggggtcagttcagggaaaatccaagtgtgatgatctagagcccactggtgaagttttatcacggcagagaatggcggttctgatccctagctgtgtgaatgtgaaccaaagctcttacggaagccctggcagcgggatggactgatttcagagatgaaaggaagcaaacaaccacctcgccgagtaagagctaacattgctgagtgcttactatctgctaggcacactgacaaactgagaaccagaaattaaataacatgctcaaagtcacacagctagtaagtggcagagctaagttacaaacctaggcattcagtgtagctccagaggccttactctcaactgctgtactatgctgcctctgcacagaagatgaagacgacttcaagaatgagcaatgctagagacataaaggggagaggaagtactgttaaatgctaatttccttctaccttgggtacaagcgggattcatagggcatttggtagaacacctaaaaggtgtctgcgtccctaacaggacagagaaaagctgcaggaagcaggaaaagagcagaagatagagtcggacaggccaaaatgaataagtgaactgccaagtgcacagaaagcagtatctcagtcagggtcaaacaccacctcggaagctggccctactcaataacaacccaggagataccatcgaggcttgggacccacggaaagtatctaaagctccgagagacagagaaaagaagtgtgggaagtagggctacaaggagcactttaggtggctccaggactcacagcaactccctcgccccaaatttcaagaaaacgagacccagagttaggtagccaactagaaaagcctttcttatgtcaccagagtccgagcctgggtcttcccacctccgatacagtgtctccatctacctttcccgttctcctggctgagaggctgcaacccccagcaaccaccagggcctggtacattcagtaggcactaaagacgcgtttatttaatgactgagcgaatgagtgaatgaattaaaagtactagggaaggcgtctgcttctctgcacgctgcggtgagggtcagcgagtgaacatagtgagtccctaggcgggcacaatatgaggtccccaatgtgcctgtgccggttccaagaagcacacgtctttacagcccgcaaatctcagagcagccccagcttccaagtctagctgccgaccgcgtaaccacggccgacctgcactcgtttcacgcaagtcccgatcatgcggggctaaaaaagaggtccccgacgtgggttcgcgggcccgaagcaccctgggacttgtagtccccaaccggccagcccagagactcctctaaagccccacgcagccctcgccaacggctccagcgccgtgctcgggccgagccaggccgcggctggctggggtcgcccctaagctggggatctgggcgaggacagaggcggcaagcaaaagagggtcctacagagcaagcccaggccgagcggcgccggccaccggccagatggcagctgatggcgacggatgcgcgagacgccactcaccatcattttggaagcttattcagcggcccgccactctcccctcttctccgagaccgggccgcccagcaacccacaatgcctcgcgcaatagaaatacccagaagcttgggccgggagaggaagagaacggaccacttccgctactctatggttcgttaccaccgactcggtgcggctagaaggacctgaggctgggcttcggggactctctagtgaggggcgttcattaaagaggggtcgccgcatttcggtcgtgcttcttagagcacggagggtctttgctcggcccgcatcacctactaacttaattccaccctcctccatccccggacgccagaccaaggaatgcaataaaggcaaaagtgtgggacgcaaagtgtgggataggctggtgccaaagcactttacgtgagcgatctcatttaatcctcacaaccctattgcgttggtcctattaaggccattttactgatgacagaaaggaggctgagaggtcaaggtgtccagtgtcacagttacatagtcagtgtcaacgggacgagcgtgggaagctgcccccaatgcccgttttctggctttgcactggccagaggctcctcgtggatggcgtgcgccaggccgcggccccagcgcctatccacggtgagcgcgcaagcgttggtggcactgggcggaagaccccctggcgcaagacgagtgccttcccgtgaaggcgtggggaggagggaagcgcagctcggaggagggaagcgcagctgggagaaggctaatcgtcgtcaatcgaggcggccttggagtggacaggaccgaga

SEQ ID NO: 1247 - DNA, 1721 bp, Homo sapiens
gaaggcttaaattaagtatgttgacaataccccaaactactggatgatatttgtaatgaatttcaccctatatcagtacagaagggtgtcacagttcagcaaaacaaaagagaatacgctttgttaaacctctactttctgaattttaggacagtgaggaaatttaacattttcaatttttttttcttttcttgactgaaaagaaagtcaagccagcaatatgtttctgagagagcagtgatgcatttcacaacactgttaactgtctgcttggctttttgaggcttccagagttcagaattgtcttctcttgaataggtcagtgcatttttttccttcagtttttctccttaagcagcaaaacagaccatttaacttccaaatatttacagcttgcaaacagataaacttcccaaatctgtttttttttatgaaaaggaaaacgatcagccacaataatctataatacgatatatttgaatcaaagttattagatgccctagggtcttttcatggcagattttatatatcaccaccattaataaatctgttatcagaattatgtctttctctctgttgatagttatttttagactaacatattcatacctccttctgatgaaaaacattaaaatttgaataaggcatattagaaaaccctaaagctctgtatttacacaaaggagactcataaatattggtttttcagggtgaagcattgtgtgttattccattttgtaccacagggaaagcctagtcacacatggggcctcattaaaagaggatctaaagaaatatttaatggttgaaatataaggtcttattctgaatatctaccttcactttataataatagaaactgaactgaaaagattcagtaagtgatttagaacatccactcattttaaaagtaatgtctaggcctaggaaagtgacatcatgttccaaatgttacaaatccagcgtttttccttgatgtctttataaatacattgtttacagtttttattctcctccatatatgatgccccttttctaagattatttcgtaggtatatcctttaatgagagaacctcataaataaacttcctgaatttgaaaacgagtgagaggagacttcaagtttgtggactgagctaaacatgtgtctactctcccttcaaacatcccatggaaatggcagtaaagacagaacaaagagaatacatttctgaatatactgaggaacatatactccagagagcagaaacaggaagaggggcctctgctaaagctgaaggagtcttcaggagggaacccagctgggctctgtgttctggttggcagatacagagagtagccaaggtcaaaagcagacaaacagaaagtgaggtgattggccacaggtttggaaatggctcaggtttgctctttccaaccccttgcatgtcactgcacatttacctccagaagtaaagcaggagaactctgcaaagggaaccaacaatctgcatgggagggcattgcctccaagtgtgtgggctggcgaccaagtgcagccctctgccctagttatgggagttggagagggacttactggtttgcatgttccatgcaagagctaaagcaaagcacatctcggagaagtgagccaggaaagtggatcaatccatgccaacaacctatattaattaacctgataattaatatgtatataaagtgaaaaaaaagaaagaaaaaa

SEQ ID NO: 1248 - DNA, 45 bp, Homo sapiens; identical to SEQ ID NO: 827

SEQ ID NO: 1249 - DNA, 102 bp, Homo sapiens; identical to SEQ ID NO: 830

SEQ ID NO: 1250 - DNA, 4529 bp, Homo sapiens
cgcagcacagtcacatcctactgaacatcatcctgttctctggggtgagtgctgtcctggaagttggggggctcagaagctgttggtgcccacctgggaggtcgcccttgcagctgctatcctgaatctcttgcccaagggcttcctctggccacaagagtgtgggaagcaagtgagagacccctgccagtagaggtggggtctgtttgtccccccactcagcttccttgcttctggctcaggggacagtgggaaggtactttctgcgagttgtcccagaggcctctagggggttgggctcctgttgcccactgaggagacctgctcatctaccttccttgtgtcacttcctcactccttcccagtgtttctagaatcacctcccaaatatcccacttgcacccaaaaccttgtcttgggtcagcttctgggagccgacctaagccagcagctataatgctcagggcttaagagctttggaatcagatggacctgagtgtgaatcccgcccctgccacttaacctgagtgtgaacttgggagcctgccccacctctcggaacctcagttcctccatctatgaaaagggaacttacgtgcagaaaaccaagtgactatgagggggatggggcagtgtgagatgacgggaccagagcacgttcctggctgcagaggccacaagtcacgctgtctctgagaggtatggggacaggggcgcagaggaagaatgatcgcgagtcctcagccctgtttggctgacgggggacagggatgggtgggaaagaggtacagcgtttttccaccttccccacccatcacccctgagattccaaatgaacatcgggaccaaccccgggagcccagcggatgttcagggtagggcaaagaacaggtgccaagtttgctccctggggtgtgagactgggcagcctcaagagctgcattggtaggactttcaccaggtagacagcaggcacctcgcccctgcagatcacagcttccagggccacctgtccacagaatcccttcactgatctgtgcttgaggcaggggtgtgtggactgggagtccttcttttactctgggtggggcctcatgctcagagggagctctgtctacccccaccacaaacctgcagtttccctgctacagcgatggcaacctcagccacctggctgcccaggcccccaacctgggttctccctcttgttcccatggtcagcccatcagcaaactcatccacatgtccaagggtccacccccactaccctgccctgccctggtccagctaggatgtttgcagtcgtctcctcattggtctccctgcctcctctctcgccttcctaagccagaggaattctgtaagagctcaagttagatcctatcccttctctgctcagaaccctctatggctcccaactcactcagagcagaagcccacagggcctgcaggatctctgccctggccccgcctgacctcactgcctctcccttctctgttcacccacagccacggtggcctcatctctctgccataaacttgccaattatcctgctgctgcctcattgacttcgcacccactcttccctctggaacagaggacactctcgccagctctccccatggcggatccttgtctagggtcaggcctctgctccaaagtcacccctggggacaccttctctgaccagcccctcattcctatggcctcatgctgtttttatttcttcctaggacttagcacgtatcctagaaattaacctgctggtatatcctgtttcttgtctgtctctttccagtggaatgtcaccatcgcccaggtggggatttttgtgtgttttgttcactgctgtacacccagcccccagcacagcgcctgtccaggacaagtgcccagtaaacacttgggaagcaatgcaagcgtgcgtgcatggataagtatttctttggcagatgagggggctaaggttcagagaaggccctgggggtctcagactcatagcccagtgctctttctgctgacacgccctggtctctggggcagtttgttgcctgttcagcaacaaagagggtgtgcctcgttaggggtcctgcgtgcgaatcgcagtccctgcgtgtcttggctggaggtcaccaccctctctgctccagggcctgtaattaccacttaccctggtcaatgggtccgagagattacccttgtaggcagggctgtggccagggtgctcacctggcccccagcaggtcccatgggcactgtctggccgggcttcatggctgacattccaggtacatttctagccctgggctgccatgggcagagggtggggagagggtcgtgggcttcaggctggacaaaccagtcagccttcccagctgggccgcctgaccacccacttcctgtggggctccttgaggcctggagggtggagggggtctctgttcaacccccacccatgccctcttcccttctctccctcggcaggtcctcccagcagctcctgcaaacagacccccgacccaagcccttccttctgcctccactgccaccactgctgctcatctctgctggcacagaagtctcttccctggtcttccagaaatcccctctccacactcagccagagggagctattaaaactgtgggccagcccacatcagtccacagcaaagtcctctctaagggatctctgttgcttggagaataaaccctcggattccttccttggctctcggggcctcctctctgacctccctctgtctcctctcccagccttcctcctcactcaccctccagccatgctggcttcctccttgctcctgaaacagcctgaggcccacactgccccgggccctttgcactggctgtttcctctgcctggaacacttctcctaggcatccacagggctccctcccacaactccttcgggtgcccacatgggaagccatccctgaccacccccccgacttccttctgagcaaggtagggtctttctacctagtcatgagggcagggatttttgtctgttgtgttctctgtgtgcccccagtgccatcccagtgcctggcagatggtaagtgctcgacacacattggctgactgcctgaatgaacaactctatgagccgatggcagataaggacactgaggtcctctggggtaggtgaccagcccaaggccacacagctggtctgagattaggccaggagaggagcccgggttggtcacatcctggagttggcgtcttggaaactgcatcaggagaataacaaagatgagacgcaggctctaacaagtggataccagtgactctcgccccgccagccccagccctgcagccttgggcccttccaggagtcatggtctgcctgcctggggcattccaggcttcgacccaggtcctgcactttctattttgagcctcttagtcctgaggactgtgtgttcccagcaggcggcgcgggccagaggctgagcctgggtgtggctgtcaccctatctggggccagagacccagattcccgggcccttaacctgttggctgctgagggctctggcataagccctgttccctgcttgattgtctccccttcaagcccctgccctggtatcgtatcggcccatctcaccttggattatatccctgtttggccccatttgaatcctggctctgcccctttccagcaatgtgaccttgggcaagtcacttcatctctctgggtctcagtttcttcatctgggaaatggggacaataagagtacctgtctctggccatgtgtggtgactcatgcctgtaaccccagcgctttgggaagccgaggcgagagaattgcttgagaccaggagtttgagatcagccctgggcaacatagtgagacccctgtctctacaaaattctaaaaaaattagccgggtgtggtggtgtgtgcctgtagtcccagctattctagaggctgaggcgggaggattgcttgagcccaggagtttgaggctgcagtgagctatgattatgcccctgcacatcagcctgggtgatagattgaggccccatctctaaaaataacaatactaataataaataaaaatgaaaatgagtacctgtcttctggggttgcagaggagattcaatgtgatgaaattgatgagagtgccctgcagggagccggaaactcagggagcatcgataatgagtcccccaccatcagcagctggcttaaatataaaaactgtcatggcctctggagaaatgacaagaattcgaaggagcttccctgcactggccaccctacaccctacacccttacttcctcccctcaacttgcctggatttatcgacccccactaccccactggttgccttctctccacctggcacatttcgtatgaatttgcttgttggttcttgcctatctccccagtagaacattagctccttcaggacagggacttttgtctaccttatgcacctagtgcaatgcctggcacacagtcggtgcttaataaatgtttcttaaaagaaccaataaa

SEQ ID NO: 1251 - DNA, 3030 bp, Homo sapiens
tcacccacagccacggtggcctcatctctctgccataaacttgccaattatcctgctgctgcctcattgacttcgcacccactcttccctctggaacagaggacactctcgccagctctccccatggcggatccttgtctagggtcaggcctctgctccaaagtcacccctggggacaccttctctgaccagcccctcattcctatggcctcatgctgtttttatttcttcctaggacttagcacgtatcctagaaattaacctgctggtatatcctgtttcttgtctgtctctttccagtggaatgtcaccatcgcccaggtggggatttttgtgtgttttgttcactgctgtacacccagcccccagcacagcgcctgtccaggacaagtgcccagtaaacacttgggaagcaatgcaagcgtgcgtgcatggataagtatttctttggcagatgagggggctaaggttcagagaaggccctgggggtctcagactcatagcccagtgctctttctgctgacacgccctggtctctggggcagtttgttgcctgttcagcaacaaagagggtgtgcctcgttaggggtcctgcgtgcgaatcgcagtccctgcgtgtcttggctggaggtcaccaccctctctgctccagggcctgtaattaccacttaccctggtcaatgggtccgagagattacccttgtaggcagggctgtggccagggtgctcacctggcccccagcaggtcccatgggcactgtctggccgggcttcatggctgacattccaggtacatttctagccctgggctgccatgggcagagggtggggagagggtcgtgggcttcaggctggacaaaccagtcagccttcccagctgggccgcctgaccacccacttcctgtggggctccttgaggcctggagggtggagggggtctctgttcaacccccacccatgccctcttcccttctctccctcggcaggtcctcccagcagctcctgcaaacagacccccgacccaagcccttccttctgcctccactgccaccactgctgctcatctctgctggcacagaagtctcttccctggtcttccagaaatcccctctccacactcagccagagggagctattaaaactgtgggccagcccacatcagtccacagcaaagtcctctctaagggatctctgttgcttggagaataaaccctcggattccttccttggctctcggggcctcctctctgacctccctctgtctcctctcccagccttcctcctcactcaccctccagccatgctggcttcctccttgctcctgaaacagcctgaggcccacactgccccgggccctttgcactggctgtttcctctgcctggaacacttctcctaggcatccacagggctccctcccacaactccttcgggtgcccacatgggaagccatccctgaccacccccccgacttccttctgagcaaggtagggtctttctacctagtcatgagggcagggatttttgtctgttgtgttctctgtgtgcccccagtgccatcccagtgcctggcagatggtaagtgctcgacacacattggctgactgcctgaatgaacaactctatgagccgatggcagataaggacactgaggtcctctggggtaggtgaccagcccaaggccacacagctggtctgagattaggccaggagaggagcccgggttggtcacatcctggagttggcgtcttggaaactgcatcaggagaataacaaagatgagacgcaggctctaacaagtggataccagtgactctcgccccgccagccccagccctgcagccttgggcccttccaggagtcatggtctgcctgcctggggcattccaggcttcgacccaggtcctgcactttctattttgagcctcttagtcctgaggactgtgtgttcccagcaggcggcgcgggccagaggctgagcctgggtgtggctgtcaccctatctggggccagagacccagattcccgggcccttaacctgttggctgctgagggctctggcataagccctgttccctgcttgattgtctccccttcaagcccctgccctggtatcgtatcggcccatctcaccttggattatatccctgtttggccccatttgaatcctggctctgcccctttccagcaatgtgaccttgggcaagtcacttcatctctctgggtctcagtttcttcatctgggaaatggggacaataagagtacctgtctctggccatgtgtggtgactcatgcctgtaaccccagcgctttgggaagccgaggcgagagaattgcttgagaccaggagtttgagatcagccctgggcaacatagtgagacccctgtctctacaaaattctaaaaaaattagccgggtgtggtggtgtgtgcctgtagtcccagctattctagaggctgaggcgggaggattgcttgagcccaggagtttgaggctgcagtgagctatgattatgcccctgcacatcagcctgggtgatagattgaggccccatctctaaaaataacaatactaataataaataaaaatgaaaatgagtacctgtcttctggggttgcagaggagattcaatgtgatgaaattgatgagagtgccctgcagggagccggaaactcagggagcatcgataatgagtcccccaccatcagcagctggcttaaatataaaaactgtcatggcctctggagaaatgacaagaattcgaaggagcttccctgcactggccaccctacaccctacacccttacttcctcccctcaacttgcctggatttatcgacccccactaccccactggttgccttctctccacctggcacatttcgtatgaatttgcttgttggttcttgcctatctccccagtagaacattagctccttcaggacagggacttttgtctaccttatgcacctagtgcaatgcctggcacacagtcggtgcttaataaatgtttcttaaaagaaccaataaa

SEQ ID NO: 1252 - DNA, 713 bp, Homo sapiens
gggagaggagccctgagctcacctcctgcccccagcccagggctcttaggtgcttgttggtgtcaggcccaggcccccctctcatcaagcagccaataaaactgccctggttggcgttctcatttcacagatggagagactgagcccagagagggagagtcacctgtctgatgtcacacagaggtcagcatctgggctgggattccagcccaggaccatgtggggtggggggcagtggatcaatcttttcctggagggagtcaatggtgatggtgggaatgggtcaggggtgctggcaaggagggtccaaggcccccaggagggagggaggcatgggagatgagtttgtccctcttgagttctgtctctctctgtgtctctctgtttctgcctctttctgtctccttgtatttctcagtccctgtcttcgtctatacctctttctctcttccttgtgtatctgacccactgcccaggaggggatgcaggcagagacccctggcttgggtcctggagttggggcccacgaggggattgacatctggggttgagctgggaatctgaagccagaccctgcagccagggacagcattccagtctcggctccacactccagggatagccttggaacgccaggcagttcagagagcctgaggtctggtcttggagacctgggttccaatcccagctttgccacattccagccatgtggc

SEQ ID NO: 1253 - DNA, 1063 bp, Homo sapiens
gggagaggagccctgagctcacctcctgcccccagcccagggctcttaggtgcttgttggtgtcaggcccaggcccccctctcatcaagcagccaataaaactgccctggttggcgttctcatttcacagatggagagactgagcccagagagggagagtcacctgtctgatgtcacacagaggtcagcatctgggctgggattccagcccaggaccatgtggggtggggggcagtggatcaatcttttcctggagggagtcaatggtgatggtgggaatgggtcaggggtgctggcaaggagggtccaaggcccccaggagggagggaggcatgggagatgagtttgtccctcttgagttctgtctctctctgtgtctctctgtttctgcctctttctgtctccttgtatttctcagtccctgtcttcgtctatacctctttctctcttccttgtgtatctgacccactgcccaggaggggatgcaggcagagacccctggcttgggtcctggagttggggcccacgaggggattgacatctggggttgagctgggaatctgaagccagaccctgcagccagggacagcattccagtctcggctccacactccagggatagccttggaacgccaggcagttcagagagcctgaggtctggtcttggagacctgggttccaatcccagctttgccacattccagccatgtggccttgggcccttagcctttgttcctgtaaaatgggaccactgagagcccgatctcagggttttatgaggaggaacgatgagagggctgtgctgggcttcctgaagccctgtgtggcctggaaagcactcaatagatgataactcagtgtaatgatttcttctagcagatggggaaagcgagagttaaagaggcccgatcatttcactcactcattcctcaaacgttattaagcacctgctatgcaccaggtgctttgttttgtatccattaactcagggttcagcaaactacagcctccaggccaaatctggttcacagcctgtttttataaataaagttttattggcaca

SEQ ID NO: 1254 - DNA, 4387 bp, Homo sapiens
tacttcaggtgaccagaagtcagcagcttcccagaagccccgaagccggggcatcctccactcactcttctgctgtgtctgccgggatgatggggaggccctgcctgctcacagcggggcgcccctgcttgtggaggagaatggcgccatccctaaggtgcgtgggggccaggtggggccacgggggcacctggactcagtcttcagggctttaggggaaggggctcctgactgagcttttcaggatggacttgcagacctgaaaggtgcagagtaggagggtggcagcctcccctgccaggccctgcccactgtggggaaactgaattctccctcataagtggaagctttttcctaccttggtttttagagaggtctcaaagagccaagaggcctacccaagccctagagctggcaggggcaaagctgggaagggggaagtatctgttcctggggcctggggttcctctggagacggctagggggagaagcctgcgtgggaggaaggaccaggcccggagagaggcaccccagccagccccgccctccctacagcagaccccagtccaatacctgctccctgaggccaaggcccaggactcagacaagatctgcgtggtcatcgacctggacgagaccctggtgcacagctccttcaaggtgggccctgctcaacagccctcagcccgggtctcggggggcatcccccaccctggcctgggagggaggtgtgtgctggaccccatgccctggggctcctcctccaactccagcagctcttttccccccacagccagtgaacaacgcggacttcatcatccctgtggagattgatggggtggtccaccaggtgagggccaggaagaggcagtggtgggcttggcatctgcctccagaccctaggctcttcccaccaatccggagcgcctcggatgggaattggatacatgtggaatgtcagaggcccagagagggtgtgagacttgtcccaaagtcacacagaacctcaagggcttgtgctgactccaagcctgcagagtgggctcctcctctaggctcccccgtgctgtgctccctcgccccaccctgcccgggacccagttcaagtaattcaggataggttgtgtgctgtccagcctgttctccattacttggctcggggaccggtgccctgcagccttggggtgagggggctgcccctggattcctgcactaggctgaggttgaggcaggggaagggattgggaattagggacctcgtgaggtaggactggccagtggagtggaagttttgatcgttttctggcggggggtgggtacagtttccccagcagtggtcagggtagctggccaagcggacgctgcgggcccagtctccttcctgtgcgcctctgcctccctggcccatgccctgccagccctcggccacccccacactgccccactggcccgcagccccctcactggcccgccccccaggtctacgtgttgaagcgtcctcacgtggatgagttcctgcagcgaatgggcgagctctttgaatgtgtgctgttcactgctagcctcgccaaggtgagccccacaggggtcccggggcaaccctgccctcctacctacctcccgcatgcagcccaatgaacctgcgggccccaggatgacccacctcctgctcccagtacgcagacccagtagctgacctgctggacaaatggggggccttccgggcccggctgtttcgagagtcctgcgtcttccaccgggggaactacgtgaaggacctgagccggttgggtcgagacctgcggcgggtgctcatcctggacaattcacctgcctcctatgtcttccatccagacaatgctgtgagtgcgggctggactgggactgggacaggagctgagacccaggaaggggtcagtccattcaggccaccttggcctcttggatccccagttggggggtgggtgccctcccagtccttcctgcattcattgcctgtgcctgccgcccactcccctcatccacctgccctgtagccatatggtcttttcccctcgcacaaagcagagcatctgccatgcacaggggcccccacagggcaacggagtttggaaagtttcaatttttcgaattgccagttgtgacctactgatggcccacagaattaatttagtgggttctgattgggaattttaacaaaatgaaatagaatagaaaatatccggtcgggtgcagtggctcatgcctgtaatcccagcactttgggaagctgaggtgggcaggtagctgagcccagtagttcaagaccagcctcggcaacatagtgaaaccttatgtctacaaaaaatacaaaaactagccaggcgtggtggcgcatgcctggagtcccggctatgcagaaggctgaggtaggagtatcacttgagccctggaggcagaggctgtggtgagccaagattgtgccactgcactctagcctgggcaacagagcaagaccctgcctcaaaaaaaaaaaaaagtatccgagtgcttcgcacagataaggttaggaattgtgaagcttttgcattgttacgttataaatgtgttttcctggggattgctgtcaaaaaagtttgaacactgtgggtgaggggttttcagaaactgcatgatctgagtagtggctacatagggctggcctggaaattctgcacccaggaccacctgcccccctcatcttcctacacccacttccccaggtaccggtggcctcgtggtttgacaacatgagtgacacagagctccacgacctcctccccttcttcgagcaactcagccgtgtggacgacgtgtactcagtgctcaggcagccacggccagggagctagtgagggtgatggggccaggacctgcccctgaccaatgatacccacacctcctcccaggaagactgcccaggcctttgttaggaaaacccatgggccgccgccacactcagtgccatggggaagcgggcgtctcccccaccagccccaccaggcggtgtaggggcagcaggctgcactgaggaccgtgagctccaggccccgtgtcagtgccttcaaacctcctcccctattctcaggggacctggggggccctgcctgctgctccctttttctgtctctgtccatgctgccatgtttctctgctgccaaattgggccccttggccccttccggttctgcttcctgggggcagggttcctgccttggacccccagtctgggaacggtggacatcaagtgccttgcatagagccccctcttccccgcccagctttcccaggggcacagctctaggctgggaggggagaaccagcccctccccctgccccacctcctcccttgggactgagagggcccctaccaacctttgcctctgccttggagggaggggaggtctgttaccactggggaaggcagcaggagtctgtccttcaggccccacagtgcagcttctccagggccgacagctgagggctgctccctgcatcatccaagcaatgacctcagacttctgccttaaccagccccggggcttggctcccccagctctgagcgtgggggcataggcaggaccccccttgtggtgccatataaatatgtacatgtgtatatagatttttaggggaaggagagagggaagggtcagggtagagacacccctcccttgcccctttcctgggcccagaagttggggggagggagggaaaggatttttacattttttaaactgctattttctgaatggaacaagctgggccaaggggcccaggccctgtcctctgtccctcacacccctttgctccgttcattcattcaaaaaaacatttcttgagcaccttctgtgcccagcatatgctaggcccaccagctaagtgtgtgtggggggtctctacgccagctcatcagtgcctccttgcccatccttcaccggtgcctttgggggatctgtaggaggtgggaccttctgtggggtttggggatctccaggaagcccgaccaagctgtccccttcccctgtgccaacccatctcctacagccccctgcctgatcccctgctggctgggggcagctcccaggatatcctgccttccaactgtttctgaagcccctcctcctaacatggcgattccggaggtcaaggccttgggctctccccagggtctaacggttaaggggacccacataccagtgccaagggggatgtcaagtggtgatgtcgttgtgctcccctcccccagagcgggtgggcggggggtgaatatggttggcctgcatcaggtggccttcccatttaagtgccttctctgtgactgagagccctagtgtgatgagaactaaagagaaagccagacccctat

SEQ ID NO: 1255 - DNA, 276 bp, Homo sapiens
tttttttttgagacgaggtctctgtctcccaggctaatgtgcaaaggcatgatcatggctcactgcagcctcaacctcctgggctcaggccatcctcccgcttcagcctgtaggagtatttgggactacaggcatgcaccaccacgcctggctaatttttaaatttttttttgtggagatgggttcttactatgttgtccaggctggtctggaacttctaggctcaagcgatcctcccacctcagcctctgaaagtcctgggattgcaggtgtgag

SEQ ID NO: 1256 - DNA, 1226 bp, Homo sapiens
gtatacatccatacacacacttgaatattttgtcaaaagaatgaaaacttcttataaccatgttttgaagatcttttatacctcatagaatctccccgtggctcttgttttcaacaaatgcctgtggattggttaaggttctactgaatcttaagtattatttacagcagagatggggccaggagtagaatattcactggacagatcccaagtctgtagtagaaaacagcttgttcattatcctctgaatttcctttgccagaagagttgtagggaagaaatggggtggtcctcccattggtctaacttcttgagtgtaaggctttggttctcaactttggctatatgttgaagccactcttgattcctaagtctaatccccagggtttctgatttaattggtgtagggtgtggccaggaccaaataattgtaatgtgtagccaagattgagaaccactgccttaggagatgacaacccccagtctcagttaagaaattagcaggcttattttgcttaactctaggtaatatacgtactgagaaggtctgggaaccatcccaatagtaatgaggatccatagctccctgatctttgtttcaaaggtctattctatacgaaaagataccagagatcctcagagaaatagctgtttttaggactggagcagggaaagaacaagatgtgcctggaatatcttgctgtgtcagaaagcaaagaaataatcagagattattgtcagaagaacataaaagtctgagggagttatgactggtcaaatctgggatttttttttttttcccccgagacagagcctggctctgtccctcaggctggagtgcagtggcacaatctcagctcactgcagcttggacctcctgggctcaagtgacccttccacctcagtctcccaaatagctgggactacaggtgcggaccatcaccctggctaattaaaaaaaattttttctttttttggagagatgaggtctcattatgttgcccaggctgatctggaactcttgggctcaagcaatcctaccatgttggcctcccaaagtgctgggattacaggtgtgagctaccacgccaaatctgggaaaatctgagaatcaaaataagtaattatagtcatggattataactcattgaacaaagtaggaatcctttaatctgtactcatacaggtaaataaatgaaaaaaatgaaagtttgataagaaatgga

SEQ ID NO: 1257 - DNA, 2837 bp, Homo sapiens
agacacgaatgcagagtttgagtccagatcccaaagcccagtacacaagtgtctacggagccctcaagaaaatcatgcggaccgaaggcttctggaggcccttgcgaggcgtcaacgtcatgatcatgggtgcagggccagcccatgccatgtattttgcctgctatgaaaacatgaaaaggactttaaatgacgttttccaccaccaaggaaacagccacctagccaacggtattttgaaagcgtttgtctggagttagaaagttctcttcttcaacacgtccctccccagggtgttcctccctgtgacccagccgcctcgacttcggcccgcttgctcacgaataaagaactcagagttgtgtgtgcaatgcacacccagacacacgcacgcacacacacgcgcgcgcacacacatgcttttttctgttcccctccgctttccgaagcctggggagaaatcagtgacagaggtgttttggttttattgttatgtgggttttcttttgtattttttttgtttgttttgtttttaaacattcaaaagcaattaatgatcagacataggagaaaccctgaatagaaacaaaacttttgaatgctggattcaaaaaaaaaaaaaagttatctggacagcttctttgagactatttaaaaactggtacaacaggtctctacaacgccaagatctaactaagctttaaaaggtcaagaagttttatggctgacaaaggactcgcgcaacgcagaaggcctttcccaccttaagcttccggggatctgggaattttacccccattctcttctgtttgtctgagtctcatctctctgcaagcaagggctgaaatcattttgtttggttgttttgaaggaaagaggcggggtgggggggtgcaaatctgccagcagctcttacgtaaggcatgttttattggggagggctgagcttttattttctcctctccagtggggttggcttttattgtttcttgtttgggtttggaatggaaatatggatagcagcataaagtacttttattttgacaaaattcatttttttcaacaatggagacatagatttgacccacaataacttctccccctctctttttactctgctcaaaaagcatctctcctcccattacccaaccttggtcataagtgtgcctggctggtttgcagatatttgttctgctttgtaaaaattggccattagtgcatttattgagatgatctctaaagaggtatgccctgacctacccctgattttatgacattggggcccttcttttgctgaaactgccttacgtaatggttttactccttgaaagagatttgacggaatccattttatgccaagtgctgccctgcactgtttctgcaatatgtggtgtatgctgtggtgatcttgctgggaatgattataagtgtgtgtgtggtgggggagtgggtattacatgcattgctgaagagtcatcctggtgttcctcattcctcccaccttcccgtggtcattttaattacggggcagtgtcaccgcaaagggaggaaactcaaagccgaaagcaaaattccaggcctgattctggcttttgaggttcctggttcttgaagccaggcctgacccgactctcagatggggtcagtcccgtcgctttgcagactgaccctggaaatctacaaaatgcagattttcctgatttcctcttcttttgcccagttttttttttttttttttttttttaaagcctggattgtaaccagattttcttttttcccccttctcagctgtaaatatgatatctcctttcagggccccagcttaagggcaaagtgagttaatgtgtagacaaaggcgagggacaagagagagttaacatctaaacagtggaaaaagccatggtgtgtggtttctgggaaccaccaacacttgcaggtttagctttttcccagggttgactacaagaaagaaaaccatgtttttgcaagattaaaatgtggttgagtgtgcctaaattaaccatccccatttttatcatatttccaccatcacttcagggttttaagagtcagtgctcacctgggcggagctggtagtacattttgcttcttaaaaagctaagtcctgggttccgtctgattttaggttccaggaacttcctgagaacacccgatcgcagagggtaattttctggagtttgttttgcagggatagctgggagtatggccaccctgctccacgatgcggtaatgaatccagcagaaggtaatgtttcatggtcccagggaggggcagtaggggatgtgcaaaggggcacaaaaaatggttgtgggagagtggagaggactgaaggtgggcagagcggctcctattctccagtcagagcagacaggagaattgaattttttactacgttatcaaaggcctcaagaaaggacgtgaacataagagtttttggtattcctgtgctcggagctactcaaagtgtgttttacagaccagcagcatcagacatcttgaggggtgttggaaatgctaattctgaggctgggtgcagtggctcatgcctgtaatcccagcattttttgggaggccgaggtgggcagatcacttgaggtcaggagttcgagaccagcctggccaacatggagagacccccatctctactaaaaatacaaaaattagcctagtgcggtgtgtgcacctgtaatcccagctactggggtggccgaggtgggagaatcgcttgaacccagcaggcagaggttgcagtgcaccgagagtacgccactgtactccagcctgggccacagagccagactccatctcaaaagga

SEQ ID NO: 1258 - DNA, 2201 bp, Homo sapiens
agacacgaatgcagagtttgagtccagatcccaaagcccagtacacaagtatctacggagccctcaagaaaatcatgcggaccgaaggcttctggaggcccttgcgaggcgtcaacgtcatgatcatgggtgcagggccggcccatgccatgtattttgcctgctatgaaaacatgaaaaggactttaaatgacgttttccaccaccaaggaaacagccacctagccaacggtattttgaaagcgtttgtctggagttagaaagttctcttcttcaacacgtccctccccagggtgttcctccctgtgacccagccgcctcgacttcggcccgcttgctcacgaataaagaactcagagttgtgtgtgcaatgcacacccagacacacgcacgcacacacacgcgcgcgcacacacatgcttttttctgttcccctccgctttctgaagcctggggagaaatcagtgacagaggtgttttggttttattgttatgtgggttttcttttgtatttttttttgtttgttttgtttttaaacattcaaaagcaattaatgatcagacataggagaaaccctgaatagaaacaaaacttttgaatgctggattcaaaaaaaaaaaaaagttatctggacagcttctttgagactatttaaaaactggtacaacaggtctctacaacgccaagatctaactaagctttaaaaggtcaagaagttttatggctgacaaaggactcgcgcaacgcagaaggcctttcccaccttaagcttccggggatctgggaattttacccccattctcttctgtttgtctgagtctcatctctctgcaagcaagggctgaaatcattttgtttggttgttttgagggagagaggcggggtgggggggtgcaaatctgccagcagctcttacgtaaggcatgttttattggggagggctgagcttttattttctcctctccagtggggttggcttttattgtttcttgtttgggtttggaatggaaatatggatagcagcataaagtacttttattttgacaaaattcatttttttcaacaatggagacatagatttgacccacaataacttctccccctctctttttactctgctcaaaaagcatctctcctcccattacccaaccttggtcataagtgtgcctggctggtttgcagatatttgttctgctttgtaaaaattggccattagtgcatttattgagatgatctctaaagagctatgccctgacctacccctgattctatgacattggggcccttcttttgctgaaactgccttacgtaatggttttactccttgaaagagatttgacggaatccattttatgccaagtgctgccctgcactgtttctgcaatatgtggtgtatgctgtggtgatcttgctgggaatgattataagtgtgtgtgtggtgggggagtgggtattacatgcattgctgaagagtcatcctggtgttcctcattcctcccaccttcccgtggtcattttaattacggggcagtgtcaccgcaaagggaggaaactcaaagccgaaagcaaaattccaggcctgattctggcttttgaggttcctggttcttgaagccaggcctgacccgactctcagatggggtcagtcccgtcgctttgcagactgaccctggaaatctacaaaatgcagattttcctgatttcctcttctcttgcccagtttttttttttttttttttttttttttttaaaagcctggattgtaaccaaatttttttttttcccccttctcagctgtaaatatgatatctcctttcagggccccagcttaagggcaaagtgagttaatgtgtaaacaaaggcgagggacaaaaaaaagttaacatctaaacagtggaaaaacccatggtgtggggtttctgggaaccaccaacacttgcaggtttagctttttcccagggttgactacaaaaaaaaaaaccatgtttttgcaaaattaaaatgtggttgagtgtgcctaaattaaccatccccatttttatcatatttccaccatcacttcagggttttaaaagtcagtgctcacctgggcggagctggtaatacattttgcttcttaaaaagctaagtcctgggttccgtctgattttaggttccaggaacttcctgaaaacacccgatcgcaaagggtaattttctg

SEQ ID NO: 1259 - DNA, 462 bp, Homo sapiens
ggagatttagggagagctgatgttacagtttgagtctgaaggcagtctggaggcacaatttcttccttgagagagaccccgtttttttctcacgaggccttcagctgattaaatgaggtgtatgtacccacagtatacaggttaatctactttattcagagtctactgatttaaatgttaatctcatttagaaaatcccttcatacatacatctaaactagtgttagatcaaatatctgggtactgtggctcatccaggctgacccataaaattaaccatcacacctgtgcaagcgcttttccctcctggatggtgtcctagggatgacagaggaggggaaagccaggtctctgcttcaaggagacaaaattatgcatacgaagaaattaagaatgctgctgtgtctgtggagtagccattcttttattcctttactttcttaacaaacttgcttttactta

SEQ ID NO: 1260 - DNA, 836 bp, Homo sapiens
gcaaatctcttgaacccaggagttcaagaccagcgtgggcagcataatgagaccccgtctctatgaaaaatacaaaaattagccaggtgtggtggtgcgtgcctgtattcccagctgttcggaaggctgaggtggaaaaattgcttgagtttgggaggttgaggctgcaatgagtcatgattgcaccactgcactcagccagggcgacagagcaagactgcctcaaaacagaaaagaaaacaaaggctaattctcaggctctacaccgaaactactggatcagaatccctggagctagggaccaaaatctgtttattggtgattctgttgcatgcttttgcactattctaaaacctatgtgtgcatacacacacacacacacacacactcactctcttagcccttgttaacccttatcgatcctaagacaaatgtatggggaacccatcagaggctattctttagggctagtgttcaatttgactgtttttaatatgaaagattatggatcacatttcaaacagatgtgaacgtggagagaataatacgatgtaccgcagtgtgtccatcactgttcttcagaaattcacattgggtcattttgttttagccatctctttccacattatcttctttttgttcttttaaatttcgggggtaatatgaagcaagcctcagctgggcagaccagagtctgttccctttttatatatcccggcgtcttagccagctcgtgtctgaatagtgagtaccttttgggcctggcactgggcaggccttcagctgggtcattctctacctggcgatggctttaggtgagttgtggagctcttttc

SEQ ID NO: 1261 - DNA, 462 bp, Homo sapiens
ggagatttagggagagctgatgttacagtttgagtctgaaggcagtctggaggcagaatttcttccttgagagagacccagtttttttctcacgaggccttcagctgattaaatgaggtgtatgtacccacagtatacaggttaatctactttattcagagtctactgatttaaatgttaaactcatttagaaaatcccttcatacatacatctaaactagtgttagatcaaatatctgggtactgtggctcatccaggctgacccataaaattaaccatcacacctgtgcaagcgcttttccctcctggatggtgtcctagggatgacagaggaggggaaagccaggtctctgcttcaaggagacaaaattatgcatacgaagaaattaagaatgctgctgtgtctgtggagtagccattcttttattcctttactttcttaacaaacttgcttttactta

SEQ ID NO: 1262 - DNA, 522 bp, Homo sapiens
cttcctcaaaagtatataaaatttgaaaagacctagaagtgatctagtggaatgaagacgctgaggtaccattgaggttggggaaactactgggacgtgcttacaggataaactgcaaaacaaaagcacaagtttgtaatcatggaatgacatgccttattctgaaaacttaacgtttgtagcgtaccttataattcataagacatttaaaaatggtattgaatcccaataacctatgcgtagggttggatcttgttgttatccctgttttttaatggaaaatctgaggcctgaagatggtaggccatgtatatgcctgccccgccgttgagcctggctcctgctgttggagaaactttcccagtctgtagagagaggatgtggtcctggcaagcctggctcctgcctgattctgtatcttctggtaacacacagccgtcatttaaaaaaaaaaagacaaggtctttccctctgacagactaaaagctgaatccgcttatttcgaactctgccttgaggcgg

SEQ ID NO: 1263 - DNA, 607 bp, Homo sapiens
ctcaaaaatacttcatccatttgagcaatatgaaagaataggctagagagaaacagatttggtttttcaagctaaaaagaataacagaaagtgggcgagtcttcagtgagctgtctgcctttgaaacctaggaagtaaacttaatttggatgtgcatttaggagatgaagcactacaggtggtgaaatgctctagcaatgaagcagggaagggagaggggggaaaggaaatttgagccaagcaacctgaaggtcaggggaagccggtcttacagatgttaagggaggaatccaagtaggcaaaggggatgaacagcagtgcaaaggctctggggcagcaggttgcccggtatgttccagaacaggaaggaggccagtgtggctggcatggagagctaaggctcaaaggagaaagtgaagagaaagaggtagtaagggaccaggaggaattgagcccggccagccgtgctactgatgttagcccacatgtcacagtgtgtgagggagatagagtccttgggaacaataatatgcagagcttttaaaaactttcatactgtagccatcaattccatcatcatggtggtggtatccctgggtggtggtgg

SEQ ID NO: 1264 - DNA, 741 bp, Homo sapiens
tagagatcctggcttcacaggaaagagccaagggcatgggttttgctgagggcgtaagagcttggggaaggtgagggctaggtgtgtacgggtgccctgatgtcctcttagcctgctggtgaggaaagtgcatgtttaataaatgggctccagccaactgtgtgcagttatttgtagcctgcataattttaaaaatgtggttgagcatttaggtctatcttcagaatttaggctccatttgacttagttttcctgaaatatgtagaaaactaatggtgaaagaggacctaattcttgaattatctgcttgaactgtgttgctagttattccaagtagaatttgtaaaatggtccatcattctctaagcaaaatgagggaaataacaattattttctagaaatttcatatatattgaatattacaaaatcatgtaactagaaatgtttaaatggtcacactgggccaggcacggtggctcacgcctgtgatcccagcactttgggagaccaaggctggtggattacaagatcaggagtttgagaccatcctggccaatatgatgaaaccctatctctactaaaaatagaaaaattagctaggtgtggtggcgcatgcctgtagtcccagctgcttaggaggctgaggcaggagaatcgctggaacccgtgaagcggaggttgcagcgagccgagattgcaccactgcgctccagcctgggcaacagagcgagactccatctc

SEQ ID NO: 1265 - DNA, 11445 bp, Homo sapiens
tgattatttactgtctagaatggatgttaccagctgcatctcttaccgaaattttgcaagttgtatgggagactcccgtttgttgaataaggttgatgcttatattcaggagcatttgttacaaatttctgaagaggaggagtttcttaagcttccaaggctaaaggtaaggagtaaagtctataaacagatatatactatctagttccaggcgtggaatcttggtctgtgtttcaagcaagtgagtaatgattatgaaataatacattgaaattatattgttattcttagcagcgtaatgggtttctccctaccagtttgtttactttgtttttgattcagtaatcaaattccttacaaattcctggttccttacaaattcctggttccttacaaattagagtaaatgtatggaatgaattgtgcatctgtgacaactttattatgaaattgggaattaagctgagaactaggagcccaacactgatccatgtcattgtttttcccaattctagttggaggtaatgcttgaagataatgtttgcttgcccagcaatggcaaattatatacaaaggtaatcaactgggtgcagcgtagcatctgggagaatggagacagtctggaagagctgatggaagaggttagttttaaagtaaatgggattcaaccatttttaaaaattattttgctataacatgaaggattccctttcacttttattttataaccatgaccctaaagaatttaaattttgctataggtacccctaagctgagaaacagggggggtgtccaggtgagctgaatgaactgttcagtttggtcttctgcttttctttttttatttctttgcttattatgtgctgttaactttctttaaagtagcatgtaatttgctttagaaatgggaagtggtactgaaattttctgtagattcttaatttttcttcacaggtttttgctttaaatttgacaagtaggtaaaagcttctaatggttgttcctccccattgatttatctccccataggtttattaacaaaactaggatacccaagactgaagaaacaagaagaaacctcaagtgtattgacacgtaaagaagcagcagtcctgccccagttctcctaagaaaaatccgctgtgggcagagaacgatgatgatttaatggtgtttactcctttacaggattcttgtctttaaagctgtgtgtttttcaatggtgttgttcatacatatagtcactcacttaacttgggctacttttaaaaaaaatacacaagataaaattgatggagaaatggtgggaattgaaaacacgcaggtggagcagtggagtaaccttgagtttctctctccacttaaacctttcggagttcctttatgagggcttaccaaatctgttaggcctgcagaaacactgtcatcattatggtctaaaagggctaacagattatctttaaattctatgattcccacttgaaagtcagatgcatttgccatgtatttgcatctgtctcaatggagatgactctacagcttgcttgaatttttgcatttgttttttctttgtttttcttgacattgcttacaggaaggaaatatgtttatgcaaaccagaccacttatctgcaaaggtgtaaactatattcagtattttattgtaaatatgtatattctttaagagtatatattgtactagtgctttttttcttactgttatatgatagaagctatgaaaaaaatgaagatttctttcaagccaatcaagccaacgactcttcagccagtattggaagattttgtatttgattttggttttttgtttttgttttttaatttttaccaccatgacatgtatttttctttacctccggatcctgccagagtaatatgtcaagaagctcaagaagcacactggaggttaccttgaggcgtttgtgtaatctgcatactagtggagtagccatggtgaccgtagccacatgggtgttctgttgctgttttgcaggttcaaaccttgtactactcagctgatcacaagctgcttgatgggaacctactagatggacaggctgaggtgtttggcagtgatgatgaccacattcagtttgtgcaggtacacattgcacagtctgaggtaacctcaggttaaaatttgactagagaatttgatagcatacttaaattttcctttaataaaggaaagtggaccaatttcattggtataactggacagaaacatttttgggagaaaacaagcatatcttagagttagtatttttgccacatgaaaagatattaacaaattaggaaaccctattgaaatttttttctcataaagcaggaattacaaacagtaaaggccaataagatggaacaatatagaaattatttgggaagattatgaaaagcagttgtttgtgtcaggcatgactgatagttttttttaaaaaggggcagggggacttaaattgttgatggctatgaaagaaatttttggatgttaccttaactactgagctgtcttactggaaattagaaatggtatagttaagatggactatacaatgtaataagtctaaaagtggtggatcatatgttaaaacctgatctagatgtttctttaaccaagatgaattaaaatatagtagagttccactgtgctgattgagttactttgccttttataaaatccaatttcatttttcccctatgagtaaacacataattattcagacacattatcaacaattactagagaacaaacttctcaagtataaattttttaagtttatggacaaatacagaaaagtacacaagtcataattaccacatagtgaacctaccagtgtaaacactacccaagtcaagaagaggtttctagcatcccggcagcctttctcttgcctcttcccaaccgtttccgtatagtgctcccaaaggaaaccattatcctaccttctgacacattaaattagtttggctatgcttgaaaaaatttatataaatggtcatatagtatatatttttatttggcctttagctcaaattatgtttttgagggacaagctataaagcagtcgactcagcccagactaaggaatgcttttctttaaaaatcagagggtaagtggtagacttagtagtagcctatatggttacaaattatcaggtgttagctctctcaggtgtcctgtggcaacagtgagtgaatatttctaaaagttttggaatttgaattagttgagaacctatgtttgtgcattttgaatatattgaggatattttcccccttaactctaaacattttgagttaacattttaaaagtacattttcaacatgcagaggttgagtgcccaataagtggcaggccataatgttcggtatggcaacacaaaaatgtgtaagagacagtttctgcttgtaggaccttctaagagtgggcaaaacaatacaggcttataagaggtagctacgaaaggcctaaaggagaggacacagtgagacaggagagaagccagggatatttcacacaagaggtaacttttgagcagtgttaggatttagaggagtctgcatagcagataaagggagaggtgttagcaaagagtatctgtgaggatgatactcttggaattgcaggtcataagactgggaaagtaggtaaatgctccctgaatggggcttatactttatcctataggcagtgggaagccttaggtaagaatacagtgatacgaaagttttgcattcactttagtaatggtgaaaaactggggaacagtctattaggtggcagtctttgggctggaatatcccaactgatttctggttttattttctaaaattgttgccttggacccttcctatttttataaccagacacagaaaatcaataaaagtttgagcccagtttatagactattgccagcagtagttcaggttttaaaaaaatgatgagggattaatctaggggcatgaaggagaaaggatagattttttatttatgtctatatataaatagacatttatatttacaaaggttgacttagcaggccttagtgattgcttagcaagattagggaaaagaaagaatttgagaataagtgggattctgacatgtgtgactcattagaatgtgatgccatgaatagagatcatgaagaggatgcgagggacacatgttagacttcaggaatagaaaaaggaggttgagaagaagccattagaaaagtcagaggacaataagaatctaatcatgttgtaaaagctacctaaggtaggagaagaaagtttgaaagaggactaaacactgtcaagttctctgggaggtcatgtaaaataaggtttagggatatattctttacatataaaggatttaatcagcatttctatattaggcttgttattaggcattgcttttgggcctttctctttcacagtcattttctcttaattatagtttgtacattagaacagtttttttacttcagtacagcctcaatgtaagcatcatccatttgtgatatttggatcccttcttcccataggttgggatgaggttttatgtaccttgtaattcataataatagataaggttagataagtctaaccttattttttattcttaatattcatagtataaaagtgatatgaaagatgcattcacaactttagtaacagtggaaaacagcctgtcatagtgtaaatctgttttatagtatgacataacttgtcatagtataaaaaggatggggtttatcttcataattcctaatctttattttagttgtattgccttgggcaatgcatatcttcttgagtttcaatatttttatctataaaatgggtagataatatcaccctcactggactaaaagagatgatgtaaataaagtacctagtaatacctaggtacatagtaaacatctaagtggaatttaatcataaccattgataatgatacattccctgccttttctcaaaatagcctacgtatgttgtaaccacactcaggcctaacttttgatatagctttttcttaatagcttcaagtagctagcaaaatctttttctcaattacttgttatatggctttttgcttccactagcaacagaaatttccattagaaattttacctatccatgtgttctggccatctggaccagcacaagtgggatgagcaaactaggccaggtgctgaagttgctacctgttcatttggcagttcctctcagagtagtctttactcttccaattccatatgatcatatcctttggaagtggcaaaggctaaagtaattggaaggaagccatcaaggaaaactcatacatgagaacacatgtgtaaagtagttctcttacaatcatttggaaattggcagctttgttcatttctccctctttagtattcctgtatattctacttttgtgaatatttggttgtttttagtaatgtttcatttctgattactattttcttgtgttttgatgtaattttgtctagaaaaccactctataatacctataaggtaatcctaaagaaatattctttaagtgtttcttgtaattgccacttttttcctgtcaagtactttcagagaaactggatgaatctatatctgcttacgttttgctggcattgtatgaaggatacctgtacatatgatttagttaggtttgacaatttcatgaaaatagtgggttaaatgtattctctgttaattcacactattttaaatttatagcattcttttaaaagattctatacttaatataaaaataattatagattggttttttcttctgctgaggtcttgatttgcaacatgtttttcaaattgttaaaactgagctttttcttacctaggctaattgtgtaggcgtagttgtctcatcattgagtggagatggaagtatgccagtaatttgtgtcatttggaaagtgttggcttgagttaaagttagtgtcctataaatgtcatatataggtgaaggatactcagtgttgtggaatagctcaggaacaaaggtacatcagatgtggtctttggctaggtttctgtagctaccttttgattttgcagaaaaagccaccacgtgagaatggccataagcagataagtagcagttcaactggatgtctctcttctccaaatgctacagtacaaagccctaagcatgagtggaaaatcgttgcttcagaaaagacttcaagtaagtatatgacacttgccagattgttttcagcttacctatttttaagaaggagtgttgccaatttaatacctcttaaattgactactcgaggaaaaaactcagaagcaattaaatttggaaaacgagagcagattgttccagtctgggatgtggagactggagtccaattcaggatcatatacacaaaccaaaagtaataattacatcttaaacatggaactcttgtgcttacagataacacttacttgtgcctggctgtgctggatggtatattctgtgtcatttttcttcatgggagaaacagcccacagagctcaccaacaagtactccaaaactaagtaagagtttaagctttgagatgcaacaagatgagctaatcgaaaagcccatgtctcctatgcagtacgcacgatctggtctgggaacagcagagatgaatggcaaactcatagctgcaggtaagaacagaagcattcaactggctaagcatgtagatgggcatttttgtgacatgcaaactttcaaagagagggtttaatatgccatctttcacggcaatccaataagatagggaaataacaatactattgaatatggctaaccttcagttcaatgtctgtatctaatttttaaaaaaattatgtcatggctaaatttttctaatattcaagccaagactaagcagtttatttgtactgataatgcgatttttcagctattacaagcacttagttaaaagatcaactaaggcatccttaaaaagttttaatactttttctcattgtgcagatttcttaaacttacaggactggaaaccgtggtccagtttaatattttaaacataaatctttatggttttattttttaccaggtggctataacagagaggaatgtcttcgaacagtcgaatgctataatccacatacagatcactggtcctttcttgctcccatgagaacaccaagagcccgatttcaaatggctgtactcatggtaagcgcattatgttgcaggagcaacccctatttagctttttcctcgtaacttcaggatgttagaaattctcatctctcacttttggcatagggccagctctatgtggtaggtggatcaaatggccactcagatgacctgagttgtggagagatgtatgattcaaacatagatgactggattcctgttccagaattgagaactaaccgttgtaatgcaggtaataatagttttctcctgagatatccagtatttaaatatgataattaaattatcaatatgtaactttattttatacttacataggagtgtgtgctctgaatggaaagttatacatcgttggtggctctgatccatatggtcaaaaaggactgaaaaattgtgatgtatttgatcctgtaacaaagttgtggacaagctgtgcccctcttaacattcgtaagttgattttttttcctttttttttttaaagaccttcaaatcaacagtatgtgtagtatacacttagagtctgggagatgtagcaataatcttgacttgacttttcttgtagggagacaccagtctgcagtctgtgagcttggtggttatttgtacataatcggaggtgcagaatcttggaattgtctgaacacagtagaacgatacaatcctgaaaataatacctggactttaattgcacccatgaatgtggctaggcgaggagctggagtggctgttcttaatggtgagtgttgggatttggagaggtgaagagtagatagtggcaagactttgttctaaaactctgagagaaaaggccaatgactatagttgtacagttaagaattcagaagcagtcatctcttttgatgcaatggagattagggtgatttgtcctttagaaatatattttctaatcaaagacttataatacttgatatataacttaattcaccagtcttttgatgggtgcactgagtgaatttccaagtcattttcttctataaaacatatccttaatgcatcatcttgaattttgagtttccccttctttacagccagaatttaaagaatctgatctgcaaaacaaaggcaaatccctagtcttttccaactgtctactccatacctaattggaaatacaacctttagactattttaacaagtttccaaagtattaaactttttaaatgtagacatagctttctttccacctccattttattgacttttaatgtctaattatataatcataatttaaaagttagcattgtttttggtaccaggctgaaccttagcaggcttatggctcaactggtgaaggcttaagtgtagacacagcctgttggcctagagcattgtcagcgtgctttacagatacatagaatgcaagctggttaagtgatggtcaaatgaaaaaataatgaatttgagaatcagtaataaaattttttctaagctacggagtatttattgctaacattttatctatttgaaaataatcataactctgtttccagaagaaatttctgtaccacaatcattttatttttttaattgagacatggtctcactgtgttgcccaggctggtctcgaacccctgggctcatgcagtcctcccacctcaggctcccatagtattgggattataggcatgagccaccgcatctggccccaaaatcattttatacagttggaaagccctaagatatttttctgctttcctataatctcttctgagtcttaattctgtacattgggctgatataaagtccagtgcacagaactattctggtttgctacttagtagctgcatctgtaggataattgtccagcttcttcctgcttttcttcttctctgaaataataatagtaactaccacagagttggtgaaaattgtacttatttagatgctgctactgcttcctctccctcccccttttaagttgcctaagttccacgtgggaatggtttttttattgatttgattcccagctcttagagagtatttgtcatattaggcatttaataaattctttttgacaaaatgaacaggcatttctatttttaaaaccactgatttttaagcaaaagacagatttaggggagttttaccttattacactttaatctctggatttaccccatctcatttctcttttaggaaaactgtttgtatgtggtggctttgatggttctcatgccatcagttgtgtggaaatgtatgatccaactagaaatgaatggaagatgatgggaaatatgacttcaccaaggagcaatgctgggattgcaactgtagggaacaccatttatgcagtgggaggattcgatggcaatgaatttctgaatacggtggaagtctataaccttgagtcaaatgaatggagcccctatacaaagattttccagttttaacaaatttaagaccctctcaaactaacaggcttagtgatgtaattatggttagtagaggtacacttgtgaataaagagggtgggtgggtatagatgttgctaacagcaacacaaagcttttgcatattgcatactattaaacatgctgtacatactttttgggtttatttggaaaggaatgcaaagatgaaggtctgttttgtgtacttttaagactttggttattttactttttggaaaagaataaaccaagaattgattgggcacatcatttcaagaagtcccctctcctccacatttgttttgccaatttgcacattaaatgactcttccctcaaatgtgtactatggggtaaaaggggtagggtttaaagatgtagacagttgggttttttaagggccctttttcaataactggaacactctataacaaaggatacttatttaaatagatgacattgactatttttgtttttattaaaaggaagcttacatgcctaccaatatttaatcttttatgattgcctttttataactttttatattctcagcagagtgctttaccaattgaagtaaaatgtggcaggctggagttattgaagcagagtggcagtcttcagtttgcagagtaggggtctgtcttttaaactctgagtgcaaacttcagagttcttgccttggctgcagtttttttccttcaagaatgcagtactaacatttatttgagtggagttactgaacagtaacatagctgtgatttttggtatttgaaacactggttttaaatattttgacttgttgagggtatgttttatatagcaagacattatatagcagtaaaaaatggtgttttatcttctatataattcctgtttttattattaacaaaacagtcctaaatagcagccctcaattgtgaaaaaatttactttaaactacattaggttgtgaatgcaggttttatcagaactatgtttttgttcagtttatctgttcatatggataaatattggttgggatgacttggtgtctaatgtgtagtgctacacacctaacttatggggccaaaatagcatgtcctaatgcttgctgctgatttaaacacattaaaggtactttgcaggaaatccttgcaccatgggattaatatccaattgctgcttgtacactcattcattactaaaagttttgagaaatttttttttccagtaatgagcttaagaaatttgtggaaaataactcacctggcatcttacatctgaaataaggaatgatataaggtttttttttctcacagaagatgaagcacacaggaacctaatgggccaactgggatgaggtgactattctgagatgactattcagtggctaacttgggttaggaagaaaataattaggtattttctccaaatgttcactggtactctgccactttatttctctcatctgttacacaaagaaccaccaggaaagcaaatcagtttggttggtaactctgtaattcctaactatcactggtttggttctggactaaaactacattgacagattgaatttgcctaatatgatgactgtttttaatatggatctgtatgtgttctattcagcacaaggaaataaaattttagttgaggattcagcactaaaatccttgagatcacttctcatttcataagtgacatgcttaatgcaaataatatatgggaatactttgggtcaaagttttcctgcattaccttggatgccaaagaggtagtttggtggccaaaaagtatctttttttaagaagctgttgtagctagtctgcatgaacatgagaagtttcc

SEQ ID NO: 1266 - DNA, 535 bp, Homo sapiens
taataccacacttctggtcaacttaataaaacactctaaatttcctaaaaaggtagaaaagctataaaatatctaaaccaaatattattggttatactcgggtggatcttttattatgaactttaaatgtagggttctgatttttggcttctagtgtgtcatgtactttaccactgctcaacatgttttcaaattcccaatataataatcatattttagggaaaatccaggatttgagtatgtgatatatcattagaatccttgcttaattaacaaattaggtgtgtgccctattacctctcctgacctcagaattcttaaaattgaagtaggcaaaggaggagccccagtaggacatttctgtaactgcatgcagagttgccttcagaaaagtgaatatgattcatggaaaattcagttgctgtcgtaatttacacgcagctgctttttgttccaaaaaaaaaaggtctgaagagtcagcaagtgagacataagatacaaggttaattaactaggtgtaaaggagaaagaaaaa

SEQ ID NO: 1267 - DNA, 197 bp, Homo sapiens
agatactgcgtttcatgaagccttaccaaattattctacttgaaaatacttatgtgaacttacatagcatttcaatttgttgtacctctccttaaactaaaacttacatatctgtatggcataattagatgtttatcatttgtatacgtgttattaccactattaacatttgttgtattaagacagtgatttttgat

SEQ ID NO: 1268 - DNA, 313 bp, Homo sapiens
tttttttttttttttttggagacagagtctctctctgttgcccaggctggagtgcagtggcgcgatctcagctcactgcaagctccacctcccgggttcacgccccacgccattctcctgcctcagcctcccaagtggctgggactacaggcgcctgccaccacgcccggctaattttttttgtattttttagtagagacggggtttcaccgtgttagccaggatggtctcgatctcctgacctcgtgatccacccacctcggcctcccaaagtgctgggattacaggcgtgagccaccgcgcccggcctaaa

SEQ ID NO: 1269 - DNA, 47567 bp, Homo sapiens
ttaataatttatcttttattgaaattgttgaatactttatattacagtaaagttgattgaaaaaaaaatgaagagaaaaatcaattttaaaaaatacactcatgttgaaatcaaacaagccagccaaaccggtacaggctgagggatgctgcagggcggtttgcttctcagcaatagaacaccagagtctatatacaattctacaatgcgagaaaagtcattcactaaacatggcaggaaaggcgctgccgccagaataagaacaccagcagcgcctccctcctcctccatgctgtgaccgcccggcctccctcctcctccacgccatgcccgcctggcctccctcctcctccgcgctgtacccgcccagcctccctccagcatgaggccaagtgcaatgctagggccgaggctctggcccatgatttttcatgcagtttctgtaagtcacacactgtgcaaattaaggcttcttataggtcgaatggttgatcaacacttttttcttaaaaaaataagcacagtaaaggtggtatcatgagaacctgaagagatgagacctataccccaaatctggaaaaaattcattttctctgacacctcaactccactcacacacacacacacacacacacacacacacacaaacacacaaatcaatctttgggcaggttgtttgaattcaccagccggcaaaaatactgacaaatgtgctctgtacgcccaggcttgaagatatcatgcaaaaaggtgcagccattcctgactaaaggcatagaacaggcaaactctccaaaacctaggcactcggggaccctgtgcacgtatgtgtgtgtgtgctcgcacgcacgtgtgtgtgcccttaagaaacagaaagcaaaagagaaaagagacagaatgagctccaactcaggggacacattaatgaccagttcaacatcccgccggaagctgccccatacactgacagcctcaccatctcaagatggacaaactggtacatcacacccctgctggcaggaagaaacggtggctgtttttttttcctttttctcaaacctgagtaattgtcaaagtcaataaatagggggagagaattaaaatgctaaaatatatcggggtcaaataccctatcgggactaaagcagcaagggtttcttcgaatgcagccctctgttttgagatgcgtccggccttatgcttttaaatgaggacttggggcaaaaccctgggcacaaggtaccgccctgtggccgatctgagccatgccttattccaatgactgtaaacaatcaggaaggagtggggcctgacctccttcaccctctcccccatcacaaaaactcttcccttttgaaagtttctgttaaaggcaaaattatagaagcatcatcgagtggaagtcttatttggttggaggtgcttggctgtcccgcggctccgtgctcccctgcaggcactgcggagtcagatgtgtaagaggtcctcgtcgctgtcgtcatggaaggacaccagcttggtggagctcactgtcttctgctgtgcagagctggacttccctttcctcgccttctcacccctgaccagccccaccctatcgtcctcacgctcctgaagggcattgctctgtgcgtttctcactgggtgggagctctctgccccagctcccctgcccgagtgaactttcacctctgggatggtcagaacctcatcctcactgtcctggtcatccccatgcagggagctgagggctttcactgacttggtggtaatatggccgttctcctgcccttcctttccctgccgtggaggaggcagctggatctcttccatcagccactctgtttcattctcatctgtctcttcttccttattcacctgccagggatcaacagcagagaccacgtgagccccctaagagaccccattctgctccaccatccaccacatcagggatgctctctgctggcacgagctggggaagaactggcccactgtcctcacagtcactgcatctccagttcccagggaaaggaagacgagggctggcaacaccttcctgttcctaatgagactgcaccaaggcaggagggtttgggagggtggcagtggggtcatttggcaggagtctcacagccaagggtgggaccaagcagaaggcgttcgggatggcctggaccgaaaagcagaccagtgatcccccagcgcagctgggggagaaggggctcttccgggctactcatagactgaaaggtgcccactgcatggcaggggaggaatgtcaaaggagggactccagtcaaaagcctagttttagagagcaattcatcattacccatcgagaccacaaacattatgtcctttgatccagataatgcctcttttctgcaaatttacctgaaagaaatcatccaaatgctacatgcacaactatcttcactactgtgtgtgtgtgtgttttgttttttttttaaagaacagccaaaaacagtggaaacaacctaattattaaatacttcaaggaaatcagttgtaaccacgagagaaacttgagggaaaaaaataacaaaaaaatgtgctggcgtaagtggctgaggcaacgggtgttgctttcctttctggattccagtcagcctgtgactgctttccttggcacccctgatgagaacgacatggacagcgcagcacagggggccggggaggcaggccttcaagagactcgccacagaaaattacctttgagtatttgtaggacacgttggaacttctcctacagcaagtggtcagcttacttatcactgtttccctataaaaaaaaaggagacaataattactccagtgtagagagggcatgggcaggagccccacccccgccagccccacccccatctgcaccaccagggggctggtggtggctgcatttctcccacattctgaatgacaaatgagtagccgtgacaggttatatataccctaatgtatttgttgtgattgagtggaaagaagatgggctttggaatccaacagcagagggccctctagagcaacttaacattagggcaaggactttttcacatgactaacaggaccacaccagtccgtcgccactaagcctgcccaatggtggctcgcagagacagacatcacatgcccttcccggcccagaccttcttctgccccattctgcattttgggtgtagagggccacaatcggtactttttttttttttttggacagagtctcactgtgttgcccaggctagagtgcagtggtgagatcttggctcactgcaacctccatggttggtactttctgaccacctctctcattggcctgtggctcagctggcaaatgacagtggcagcagggaacgcctgagctggccagctcctgcccccaggtcagagccactaacactgacgcctgacgtgaaaatctgcttgaccgtcacatggagagtcctttcacccagcaaagtggcgcaaaaggatggcatcatacctggtacatagcaggcgcttaataaactcctgcatttatgatgtgaggagggcagaggggtcagctgctcagtgggaaaaggcacccatgaaaggtgccgtttaatgttctactcatctttggacacaaaggaccacggtcctagaagccgcaggcacgggtgatgtgcgagggcctcggccttggtcagacagaaatgcaggcatttaaaaaccacaacgctggggactgcttccagagagttttggactaagaacctcgagccttcgctgctgtagggcttaaaaacaaataaataaaaccccacaaaactgaccccaagattagctatgggaggcatgcatccacccgccccacctcgccctgccacccgcttacctcctctccttcttgtagagcaacagggccagcaggcagcaggtgagcgccaccagcagcaggctgagcaccgcgccgactgcctggctccgttctgacagccccttgtgcatctgcccgtcgtccccgggattctcgctgtcaaagcccaccctgcaaggacgtcacagaaaaggagccgtgtcacagggtggtcctgctgccacagccacaacctgagacctgagtccccaaggcaagagcagctctgactttcccaacaccatgtgattcttactcctgcccagaaaacaaggccacaagtcccactccacatggaagagggctgcaaaaagttcctgatgatgagtttgtggcagggttgtcagaaagcagacaagaaggcactgcttccagctccatgaactatcattcacccaaacacagaggagacaggcaggagggacgcggccccctctaggtggcccaatccacggcaggactaggctggggcagaggctgtcccgaagcaccacacttctctccagggtcagagctctttcctctcagaatttcttctggaagcagtgagcgcagcccaccatgagacaccatctccacacgaaaggggcccagggggccttagaaacaggccaggacggggcccaggggcggccacagaccagggtggggcccagggagcagcagagcccagcacagcccccgacgggtctcctctctccaagcctgctccatcccaggagaaggctcttgagcacaccagctgcctcaccagcggagttcaccattcccacccaagacccacatgcacacttgtgggaaaaagcagtgcgtttccatgacatcgaacactcaagcagagttgggacaataatagaaaatgagaaacaaccacggagacttccctttgcgcttagggagcaagatgacactcaagagtgtaacgacttgacacttctaatctctctggccctctgtcacttggggccacacacacaggaacaggatcacataaacagaaattcctcctgtgctgctggtgataagaggcaaccccagcggggcgcatcttgtgctgctgaagatgccggctgctcaaagaactgaggttgagggcaacaggccaacccgcggcccagccgcaagggctgccgctctcaaagttcagcttaagccaaacaatctaaaacatcagcaagacaagaaaccacagggacagcctggcgtccagttctaggtgggcctgcaagggttgacctctgctcagaaagaagcaccaccacactccacagacaggtctgagagctatgcagacctctccctccaagccagaaacccactcacccagaagcagctccagccactcaggaccactcgaaatgcatccaagagacacatcatcactcagttctaagcgtattttactttctacctttgatttcttctttggaccatagattattcagaagtgagttttagtcttcaaacgtatttctatttttcagttgtttgttcttggttcctaacttaattgcatcatgtatgtagttaattgcatcagtcagaaatctgctgacttaggccgagcacagtggctcatgcctgtaatcccagcactctaggaggctgaggcaggtggatcacctgaggtcaggagtttgagaccagcctggccaacatggtgaaaccccatctctactaaaaatacaaaaattagccaggaggtagtggcacacgcccataatcccagctactcaggaggctgaggcatgagaatcacttgaatctgggaagcagaggttgcagtgagccaagatcgcaccactgcactccagcctgggcaaaagagcaagtctctgtctccaaaaaaaaaaaaaaaaaaaaaaaaaaaaaaaaaaaaaaaaaaaaaaaaaaaaaaaaaaaaaaaaaaaaaaaaaaaaaaaaaaagggaaattgctgacttgcctgctttgtggttaatttttgctaaagttttctaagtgtttgatgtaagcttgggcaaacagtgttctcccaacgcagggaacagtgttctgcgcatgtctattaaatcttgcttttcactgtgctgtctcaatcttccaaaaaaagctttactctttgtctactcaacccagcaatcactaggcttgtttcttgtgtgtggttttgtcaatttctgctttacatatcaaggcttttttattaggtagatggaagtttaggattcttgtatcttcctaggaaattagcccttttaaaattataatgaccctctttattctttatccctaatatttttctttaatatcctattttatcttatattaacataactactgcagctttctttcagattattttctggtatatcttttcttctcctttgactttggtcttttctgtatccttgttttaggcatgttccctgtaaacagagttgtttttgaaatccagtttgacaacttgttttttagctgacaagtttagtcaagctatacttatgattatagatatatttagatttatttctaccatactgggctgaaatttctacttatctgatttttgttttatttttctccttgcttgtcttctttggggatttaagtatttttacttctccttttcttctccgctgttttggaagttacatactatatttatattattttagtggttattcttaaaatactggcatgcatactaagacaggaagtctaacagtatgtcttccaaacaattaggaactctaccttttcttccttccttcatttctttcaagaaaatggttttactttcatatgatgctatcactgtaagaaattttaaaagctgggaactctgccacccctctcagcttagacaccactgttgtccagtacagtgtgtcctcatagggtcgctgacagtttccttcaaactgcaaccttccgtgaagcgactatgggaggtcctcgaatgacatcatttccttcaaaactgtctcattataaagttgatgaggccgggcacggtggctcacgcctgtaatcccagcactttgggaggctgaggcaggcggatcacaagatcaggagatcgagatcaacctggctaacacggtgaaaccccgtctctactaaaaatacaaaaaaattagccgggcatggtagcgggcccctgtagtcccagttacttgggaggctgaggcaggagaatggcgtgaacctgggaggcagagcttgcagtgagccgagatcgcgccactgcactccagcctgggcgagagcgagactctgtctcaaaaaaataacataacataacataacataacataacataacataacataacataaagctgaggaaaaaaaactggtttcattatacatcatttcacataaagttgcagtttccaagaacctatcgatgatataaagtgaggatttaaagtattttaacctttcttgaattattttctaatacaacaaattagcctcccctaaagcttttacagtcttttctttgtatctgctctcctggtatttcataagtgggtgggtcttgtcatcaataactgtgctgggcacatagcctgccccttccatctgtagatgcctgtcttttagctttgtgtaaattttttgactttaatcaaatattgtgaaagaaccatttttgtaaagtaggaggaaggtgtaagacagctctatcttcatctactattgcaggaagtcaacagatgagatataggatgttaatttaaaatactgaggtaaattccagaagaaatagctaaaagaactaaaaatggtaatctattagggcgaacattgctacctgtttgttatagttacatgattttttttcctgagatctagtctcgctctgtcacccaggctgcagtacagtgacgccatctcggctcactgcaacctccaccttccaggttcaagcaattctcctgcctcagccttctgagtagctgcgattacaggtgtgcaccaccacacctggctaatttttgtatttttagtagagacggggtttcaccatgttgcccaggctggtctagaactcctgacctcaagtgatccgcccaccttagcctcccaaaatgttgggattacaagcgtgagccaccgcgtctggccatatttacatgattctacaatgtacaacactgataacatttggggaaaaaaaaatctcaggcactattccacgtcacccccgggtggtacctgcatccctcaaaatccaccatctgagtttttgctcttggtttcaacttctgtttcttttttttaaagtccttattaccttgtcagtgtgttaagggatttaaacagctcccaatcctgatgttctgaacatcatgaaaccgaggtttcctggagaatcttcctctctggttttagagtcaaacaccaaagccctataaacagtgcttttcctactcacagaagtcgaactctaaacattcaacatggacgggatcctagcctggcctggtccctcaaacccacacagaagaccagctgccatgtcaggaggcaggattcatctcatggcagctgtagcctctccatgacagagaatgcagggaaagttcacttctgggttttatcttttataaaaattcacattttgcttctttcaggaagaacttccagtttcaatcctttcattttgtaatgacgtcaccggaacaccataaacattcaaaagctgaaaataccacaagtgaaatttcaaccaaaagcctctttccctgactgtgcagctgaggatccctaagtacacaggcctgaacagcacaggacaaagctggtttttgctgagctcatgtccactgttaagggtgggcagggggagtgctgatttaagatgtaaaatgtgtgatcttcattcccccatgacccccaccactgtcgtctgctgactctacggtccctttttcaggacatgaaggaaacaattacatggcaagaattcatgttcccccaatcttaaagtctcaggacagagaatgaaaagcttatgtaaaatggtgggccaggccgggcatggcagctcacgcttgtaatgccagcactttgggaggccaaggcaggcagattatctgaggtgaggagttcaagaccagcctggtcaacatggtgaaaccccatctctaccaaaaatacaaaaattagcagggcataatgacacatgcctgcaatcccagctacttgggaggctgaggcaggagaatcgtctgaaccaggaggcagaggttgcaacgagccaagaccgcaccactgcactccagcctgagtgacagagcaagagtccatcccaaaaaaataaaaaataaaaataaatataaatacaatgatgggtgggggtaacataagaagaaaataaatccaagaggaaagcaactgacaacatgttattcgtggcaaagtataaaacggctgtgggacacaagacaaccaatggaggtgccaccttccttcagagcagaaactgctccctctgttctcatgctgattctcaaaatctggagagtaagcttttcattcattcaaacaaacgtaaaaatactgcactcaaatcaaagtaaaaatactgcactcaaatcaaagtgaaactttaccaaacaatcatttgtattacgacacaaaagatgttccaggattacacagaggaggcaccaccagtacttgcctcccaggagctaaggagagggaggcagcaatgggaacagggtagagggacagagctggggtgccctgactggaccctattcggggcatggtacacacaaaggaaacaatggcactgctgctgggggtggtgggaggtgacgcagccatggaccaaaaatcagtggcaggatgctgacaagcaacggagcggggcactgactatgtggggtccgcttctatcattttctctattttttggtgcatgttctgaatatttcacaagaaaacattggggaaaaaacacacatacacttattcttaagggaagatgtggggtacaagtgctaagcttccggatgtcatactcaccccagaggacacacggctgaggtgtaccaagagaagaggtactggcagtcggcagtctcgtgactgaactcggggatcccgtcctccaccagagggtcacagtggaagaagatggtggaagaaacagacttggtcttatcctttccgcacttagaggaagaggcaaacacgacatcgagatcgccgtctgtcaaacgggaagggcacacatggcatgtcaccatcatttttcacgagcagactgagcttagctccttacggtctaaaaagtttgcaaagacttaaaatcaggcagaagagacttcatcccacgtcccacaggcactctgttcacagcttacgaggccactcgatgcacatggatagagccctgcccttagtcagcatgcagtaaagaatttttgttttgttttaaccacgagtatttattgatggactgaagacacaattttaatggaacaataaggcacaaccgtggattaaaacagtctgctgtacagccaaaagaagggaaaagctacaattttaggaactttaaatatgcaaatcaaggagcctctgaagtatctaacagatcagtatcagatattcttccctttctatataattcctgtattacatcactcaatcacaaagtccaactgacacttcataaagaattcctcattcatttatatttgagccatccagcctggctactcccctgttctccactgttttccatcgctttgcagtgtattttttagcaatccccttcctaaagaattatgtacacatcttcaatagctttccaaagcaaggaaacaagcaagcaagcagcgagtcaagaaagtcagccaacggcagatatgtgaatgaacagactcacagagacatacattaggatggcaacagcctgattcactgaagtctaaactaagctgactttggcagaaaagttgctgtgacttgcttaaagacttggaatgccaccttaggttgtgctactagtgccagacctcttgtttctaagggattagcagtggtctacacaaggagctgggaaaccagtgtaaccagggagctaatgatacaacagtcaacgctttggacttgtataagaagcggactatggcttctagcattaacatttgccaagtgtaaaattcataaagaattttgtgcaaaacttcaagacacagagaacaatctttaaatattttggactaggatacattaggcacttccataacactaatctttctaacttggaaacgtatagtgaaaagcattccagtgcacataacactgaggcataaaccatgcagcagaggtgtgaatgcaggaggcttcacagggtgcgcagcctccttgttcaaaaagccatgagaaagtccccaagcatattgtctgagcagccgttctggtggtaaccgtgtcccaagactaagcaaatctgcaggcatattgctactttttgaatagtcaacactgcactaacaagagacgccccataggtacaaagttgagaatcagaggccagaggtagagtgacgtgggcaagcaacctaaaagacttgactccacacctctcaccaaggccacctttcaagaatatctccacccagcagccctttgatgacagagaagagtgcagaggatgatctcatactcccgagagaagtgttggttaccaaaaagctcctggagaggcaacatcccagagggcctttttttttttttttttttgagatggagtctcgctctgtcgcccaggctggagtgtagtggcacgatcttggctcactgcaagctctgcctcccaggttcacgccattctcctgcctcagcctcccgagtagctgggactacaggcacccgccaccacgcccggctaattttttgtatttttagtaaagacggggtttcaccgtgttagccaggatggtctcgatctcctgacctcgtgatctgcccacctcagcctcccacagtgctgggattacaggcgtgagccaccacgcccagctccagagggccttttaataatgaaggtagataaaaactgccagaccaccgaactatcgagccaagtcagaaatacaataccaggcatagcttggggtgccaagtagaacagaggagattctgaggcttcacaaaaagcagaaagactgcatgactacgtgaacagtatgttgaatgtacacagaagtgggaagcaaaggacatataaaaaggatggagaagcatgctggcagactcgccagagggaaggcagcaggtgcagtctacatccagtgaaagagctttgctggcttgttcctcggcaggattccctatcttactttctcagactggatggatgtgtggcattcagcagcagaacagaggaagacgatatttataaatgaagaactggcgaatggatactgagaagaaatagactgggtgtaccattctgtaacgccctgtttatagaccaaaagcaggtttgtgttgacagaacatatttggggttgttatgcaacagcagtagtactttgggagaaggggaatgatggggtggaggtagggctggtggacaggaggactgtcaagttccagtacttaaatactagactgcaaggaatagtttgctgtctgtcctttagtgaagaaatcagatgctcattttctgttctacatccaccttctccaaaaccttagcaaagtctgtgataaagatatggcactgtccccatgctgatcagcctcctgaatggtcctgtctgcgatactgcccagctgcttatctgagatatttatttggaccatcatgcacagcacccttaacagctcatcacgagagatcttgttatctttatccaaatcatatagtcgaaaagcaaactgcagtttgttgcttcggctgttgagtggttcaggtccattcacaactttgctcttttcattatcctcaatggtttggaaatgagccagagtttgcaggaatccacggaagtttacctggtcctctccctctggaaggaaggcattgatgatccagtcccccactgggttgatggcaagttctggaatcccctggaaatcgtcctgttctctcctttgtccaggttgctgaaccggctgtacagacgtgtgatttgactgtgggaaaagccagtctccttcttgatctcctcaaactcttcatcgtgcagtaaggtggaggcctgagaccccatcactgtgccaggagctcctccaggaacagaagcaacggcaacaagagggaaggcaagaatttaaccttgcccaaaaagagggctggccttgctccttggctaatgacaggatacggagcaggggctggccatgcagtacctgagtgatcaatggaccaatcctgcccatgtcagagccccgggaaaaactctggacaccaaggcttggggaagcacctccggctgatgatactccatgtgcactgccacacgtgggtgctgggaacacaacacatctgattccacgggagagctggtgggaactctgcattcaattccctcctggactctgccctgtgtgcatcttggttgattttaacctgtatctttttgctgcagtaaatcataactataagtgtaactgcttccagggagctctgtgagttatggtgaaagggtaaatctgaagttggcttgggaaccccttcagtgtgctgttgctgtcagaagtgaggaacccttgtgtggactccttgcatgaactctgctgctcccaacctttgtcactggctgaaaatctttgtggctggtgctgctgggtgccaggaatgcagaggcgagagtgcagggtaggagacggacatgtccacacacagatggggcccagagacaggcggtgcggctccgctccgggagggccccacattctcgcttgggagtagctgaagcaggggctgctgaatggactgttccacagggctgatgtggggaagcaaaccgcccagcagctccacgtcctgatgagagacagctctgccctcccgaaggaatggcaagcctcaggaagagatagaaacttcatttcttcatgaaagatgaaaagatgtcttaaaactaaagctacttcctggggctggtgaatgaagaaagtgaaaaggtctgaaagggattttatttaccaagaatgactaaatgcgcatgcacaagcactctgaaagctggggatcctcaaaggtctgctagacataccacttgtgaacgtggaggtcttatgtgtaaccagacaagtggccagtgctgcgcgatggagcgtgaagactcctgcagacacaccagcagtatcacctgctatgagaaggtgggccttcccaggaggggcactggaggtaggtttggaatcctgcagacacaccagcggtgtcaccctgctatgagaaggtgggccttcccaggaggggcactggaggtaggtttggaatcctgcagacacaccagcggtgtcaccctgctatgagaaggtgggccttcccaggaggggcactggaggtaggtttggaatcctgcagacacaccagcggtgtcaccctgctatgagaaggtgggccttcccaggaggggcactagaagtaggtttggaaggatgaggaaggtgggccaaggcattccagcaccaagagcagcatatgtaaacccaccaggttacagggtgactttgggaactagtgaataacctgatggctgaggcatgtgtaggagcagcagcttgcaaggctaccctggtacatgggagcctctcagacatcttcaagctgtgtcagagagagcctagactttccttctctgcatgatagggcccctgaaggcttctgaaacaatccttccttccttcctttaatcaagatttaccgagcactgggaaagaggacagcaagagaaggcacaacctgtgacatgcaacatctgattctgaatgactgaaggattcaccgaagtgtgaggaaggcagagaacagagaaacacagagtgctagctccgtgctgtggagttatgcaagtgaatgaggctgatcaactttcccatcatcaactcacccagaaagcagaacattcactttcccagttctattcaggggccacaggtgctatgagcagatgcaccagggcgctgtctacaatctgtgaccaggagcagcgatgctgacccagcttccctccatcaggtgctgccgtcgtggagatgcactcagcaccagggcacggagcacctgctccttctcggcgatgcgctcagcaccagggcacagagcacctgctccttctcggcgatgcgctcagcaccagggcacggagcacctgctccttctcggcgatgcgctcagcaccagggcacggagcacctgctccttctcggcgatgcgctcagcaccagggcacggagcacctgctccttctcggcgatgcgctcagcaccagggcacggagcacctgctccttctcggcgatgtgctcagcaccagggcacggagcacctgctccttctcggcgatgtgctcagcaccagggcacggagcacccgctccttctcagccgcaccagggcacagagcacccgctccttctcagcgatgcgctcagcaccagggcacagagcacccgctccttctcagcgatgcgctcagcaccagggcacagagcacccgctccttctcggcgatgcgctcagcaccagggcacggagcacctgctccttctcggcgatgagctcagcaccagggcacggagcacctgctccttctcggcaatgtgctcagcaccagggcacagagcacctgctccttctcagctatcactactctcccctcccagaggacatgatcggcagctctttgacatcagagcaggctggggttttctttaaacacacttcatttttttttaaagagttattacatccacacacggttcaaaaatcaaattatgaaaggtatatagttaagactagctgttcaaaacaaaagcagcctttcacgattatgtgagggaacaaagggcaacacccttattagtgccagtttaaaaccttccttcacaccctggactctgccctatgtgcgtcctggttgattttaacctacatcctaacatttaggccagtttcctttcatccttcttacaaatataaaatctcttacccttctctaatattatttggcattccaaaataaggaagtgtcatggttaaaaccaaatcaaaggcaattctgactgtgcacagctcagcctccacccaacctcagaaccactggatcagaccaggttttagtttttttgtacatttacttgataactaagacacaatttgcctacagtgaaatgcttagttctgacacgtatcgctcaatccactgtcaagaaattcataacaaagtaaagaattagaccaaggtttttgttttaaaagtggtccgagatttcaactgaagggagttagttgaaaattttaatccccttccttggaggaagttaaatgtggaactttgtgggaagccacggattaccttgaaggtagtacttggtcttgtcagaggttccaactttccgactgaagtgctgatcgttgggcttcacctggcatatgttggctccagagcacgccgggtttctggagcttgtgatggaggaaagttggatctcatacaggtagttgtccccattggtcctcatgtccccagaggctctgaacagcctgaagagacagaaaagatcacagtgacatggaagtccttcaagaaggcattcatgacataaaccctcagtcctcagaatcactgcagggccccaggatgcttcctttcctagggaaaggaagcacggacacgctagggcagcacgtctgtgaccccacagcaattctgaggacaccagtttccctctcaagaggctttctccccaaccagttctggcctctgagtgctaatccaccttcctcaggtgccgtatccagcaccacacggccctcgccctgtctgtgcacctcggccaccacccccaagagcagccccagtaacactgctgagaaacttattttctaaacactggtaagcccagaagattcctgctcaaacatgtcagaaggcttcggcttcaacccctgagattatcatgaagagagggagaaggacgggggatttatttttacactcatgagaattcaccatctttggtgttaaaacttaatgattgagtaacgcttttcctcagtttaagcaaaagatgacgatgactccagcaacagtaactaaaacacagacctatttatcctgcagtgctccccgatagggaaagagcggcattgctggtttaattttgaacacatttcacagctcagaaggaaaacgttttacttacttaaaataaatatctccgaggctgaagctcttgccatttatagggttggtgatggtcccattcaccatctgcacctcctgaggcttcacggcgcaggcagcccgggagtcccagctgaagtagtaagtgcagctgtcgatatcaaacctaggaggagggaagcacaggctacagtcacttccccagccagacataagggaagactgcaaaacaatgaacactgcggagcccttgaagcagctcactggctttcagtcaaggtgctgcgagacttcagttgggtcccgaggcccccactccccgggctgcgcaggcctaggcagaatttcccgactcaacactgacggcagctcggagcgagggtggttattttactcacttcttttcatcaccacaatggacagggaagatgactgtggtgcacacatcagtaatgtgacaaagcaggcaagcattcaatataaattttttaaaatttgtaaaccgtgcaacattcaaaacctggaaaatttgctcctagatttttagatttttgtttaagcttctcagactcatacattcataaatcctttggcaatttctgagtcaccccttttccaaactcagcgtctggaaggaatcagttctgttcacaaacagcagctcacatgcaccctctgttggccaagctctccctggcaccagatgcaatgtggccgggaaaacttgaatataatccaagcacatcccaggtccagatgcaggtcccagctgctcgagggtcccagccaggctgcttgaacacctcgggtgggacaaatccacgcccctttgtttctactatgacattcaaaggtagaggtcagttaagtactgctcagccagtgctaaacctagttcaagagacaagctagcccagagaagttgcactggtcttgtaacagtgtctcagcactgtatctggaggtcttccctgcctggagcagccccgcccaatacagcacaatcagcggctctggccctgagctcctaagactcagccaaaacctgcccatgaaaaccccaaggaggaattccctccagtatgctcactgcacagtcccgctctgagcccccagtctcctgacctcttgaatgcaggtctgcccaccgtctttgtacaggtcaattctatcacggaggatgcggtcttatttccaccacacggataacctttggagtacgtgacaacaactttgtcacctgaaacacacaaatgattgaactgacattatttctagtgcattataaaaagcctcaggcaggcgcagtggctcacacctgtcaattccaacactttgggaaaccaaagagggcagatcacttgaggtcaggagttagagaccagcctgaccaacatggtgaaaccccgtctctactaaaaatacaaaaattattcgggcacggtggcaggtgcctgtaatcccagctactcaggaggctgaggcaggagaattgcttgaacccgggaggcagaagttgcagtgagccaagatcgagatggcgccattgcactccagcctgggcaacaagagcaaaactccatctcaaaaacaaaaacaaaaaacaaacaaacaaagcttcaatgttaggagtaaaaatctggtttaaaggccagaagaaaataaattttgggctccctaaaggtttatcgacctgttcttgcattcccacactcaggggtggtcacctggcccactgcacaattgtcacagcctaagacctggggtcaaacccaaaccctcctactcccgtactttgtggccctgggttgctgagcttctgagccttgagggccttacctgcagaacagggcactgtccaaagtgggcaggtttcgggcatgtatagaaagtgcccaacaaactcatgtgaacagtgggaccccgggtaatggcagccttcattatcgctccaattgtgtaaactctctctatcatattaggtgctttcctgacaggtaccctcatgtgagcctcccagtaataacagagcacagaatggaaaaagtgaaaagccagaaacagaaaccaactgtggttttctagggtcttctagctttcagtcgagcactgtctgcttttaaaagtgacccattaaaagaaaaacctgagccctcgaacccgcagggtctgagagaaaagtgagtacatgctttaagctgcaggtatcactggggcagcatggccgccaggttccaactctcaagccaccaccaagaggctgcttgtggctgcgcagggggctgttctgggaacggtctgggcccagcctggctgcatggacagatgatgtctccagggcatggcgcagggtgtccaggggaagcaggtgccttccaccctgaccacacacacacagatccttccaggcaggggcatgcggtggaggcaacatgggcacagtgctcacttcccgagtgttttccacaggacacaggctgaggtactgagggctgctggatggtgaggtgggaggtgggactctaggctctcaggcctgccccaaactcaaagctgctccagctgaatttgttttaaatattgggcttctgtgtaaaattttggaaaaaagaattccactgttttacggaaaatttttaaaacttctggcatatgggatcaaacaagaaaaaactttaatagtgtagacagcccttactgattgggcaggaggctcaacctcctcggctcaggggcccagcctgtgaaacggatgacaacgctgccccatggagtggatggggattaaacatatattaagcacagctgcttgagacatgttggttctgaaaacaaaaagtctacctcccaccccaacaggggtccattccctaagcggacaatgggggcaccgtggttgtccttagatgctgtcttgttggcgccaaagattaagagctcatttggtgtcagacaccagattatttctcgttccggtcagcaggtgctcaggatgccaaatgccagtcccaggagaaagcatgagctcttcccgccaggcgaggctggacttgcaaaatggtgctctccaaatggaggtggcctgcaggtcaccgctaagaagtcagatgatctagttccatgtcaccccctgtgttcactactctcttttgctcctcctgcctcaaacttttaggaagccttaagtgttttagtcatttcagttggctgaagttggggaaagactagtcgaatatccatatatactgcaagattacaggggaaaaagcaaccctccacgaccttccctccttcccccttctggggcagtgtgggagtggcagcaataactgacctctaaagcagtaagaacctcccagggagggcgggtctcaggctggcggtctgggcgccacttcctgtatggcagctctccctccacctaccaacctgcagagtctgtgtgtgatttttatcaagggtggcagtagttttctcggaattctctttctccatctcaacatctcaagctaatctgaagtagccctgtggctgaatcaggacaactcgggaaaccccactccagcctaagaggcaaaggtgaatattttcctttactggtccctccaacaaatcctaattgctcttactaagaaacctctattttcctcctttaaataatgaaagaaaacaactttcactcagcaaccaagtacaagatcaatttcccgtgaaaaattgttaagacattttacaaagatgtacctctgaactacctgtaccaagtcctcatgcaactgtttggctttcctaaacaaacacgtgtgtttatgccaatttaggcacttgatctacagctagaacgtgaacttcagaggaactctgaacattctgagacttcctcctggatagacgcacttccccgagatagcccaacccctctaaacacacagactaggacctgcagtctcatataatacaaagcagcacttattttaatgtgccaggagagccaaaatgcctgtgagacagtgacaggcaatcatatctggaggtttccaccaaagcacatgctcactctccttgccatcctgagaacaccctcaccttcccggttcagatgctgctccttgaaccaaggaccaggacccacaggccttacctatgacacccagcttctgcgtgtgaacgagtcccaggacctggacgtcaccagttgtggtccttctgcaaatgctggccctttcagagcagcccaggggccctttatatattttctggcacagatttatatagtacctagaaaacgacacaaaggggcaggtaaaaggcatgcaagtgacgtctctgccctgacacaggagggctcttcactttactttcagagaaaggttctgataactaagggctccattccatcactgaatgtagcactaaaatagcttttccaattaaaaaaaaaaagggcaaaagaagtcttcactgaagaagggagctcaccaaccagacacacgcggagtggaatgtccacacctgcggccaccctggacacagcgtggtacagtagaaagaagggctccggggctgggagaggcagtggctagaatctcggcaagtttcccacctcacttagaaccacttaaaccctgtgagtccatgcccctgctcctcggtgatgtcttgcaggagcacctggccaagcgggcgctccccacgcagagtggtcaggaccatgggctgaccccagccagcaaagcctaaggagctcctgccaaagacccgagaaaacccacacgcctcccacaacctgagctacacacaaacgcaaatcaaacccagcctaactcagtccgcccaggttcttccagctccagaggctccgtttccagtcaccaaagctcctgcccccactctgacctcagaaccaccctctgtgccaggattgacactgcgggctgcttccaggaacagtcacaactcaaccaccatcagcctcacatgggcatagtattcccatcttgagaacccaaaagagccaaccatcgtcaagcagtctgaagttcacatgctgagggtgtggcgccgcgggtggactgggaaggcactcacgagactccgttgtggacgagggaccaggacccggtgagagaggagagcagccgcaggtcgtaggttttgtgtttctggacgaatttgcactccaacttctttggagggcagacaacttttgttttccactcaaatgtcacatcacacccacgcacttcactgaagacttgtggcctcccaatgtcctcatcttcatcacacttaaatatgatgctggatgtccggtagctgtttgctggggagtgtagggaaaagagagagagatcagactgtcactgtgtctatgcagaaagggaagacataagagactccattttgaaaaagccctgtactttaaacaattgctttgctgagatgttgttaatttgtagctttgccccagccactctgccccagccactttgacccaacttggagctcacaaaaatatgtgttgtataaaattaaggtttaagggatctagggctgtgaaggacgtgccttgttaacaaaatgtttataagcagtatactcggtaaaagtcattgccattctctagtctcaataaaccaggggcacaatgcactgcggaaggccgcagggacctctgccctggaaagctcggtattgtccaaggtttctccccatgtgatagtctgaaatatggcctcgtgggatgagaaagacctgactgtcccccagcctgacacccgtaaagggtctgtgctgaggtggattagtaaaagaggaaagcctcttgcaggtgagatggaggaaggccactttctcctgcttgcccctgggaactgaatgtctcggtataaaacccgattgtacatttgttcaactctgagataggagaaaagctgccctgtggcgggaggcgagacacgtttgcagtaatgctgccttgttattctttactccgctgagatgtttgggtggggagaaacataaatttggcctatgtgcatgtccaggcatagtaccatcccttaaacttaattatgatatagattcttttgctcacatgttttttgttgaccttctccttatcatcaccctgctctcctactacattccttttttgctaaaataatgaaaataataatcaataaaaactgagggaactcagaggccgatgccggtgcaggtccttggtgtgctgagtgccggtcccctgggcccactgttgtttctctatactttgtctctgtgtcttatttcttttctcagtctctcatcccacccgactagaaatacccacaagtgtggaggggcaggccaccccttcaggggagcagaggcgggagaatgtcagaccaaggcctgcaccagggcacgttcctgcacgccttccccatgctgcctcaggagcacctgcagactccatccgccatctggcaacacaccacgtgctgccctggccacatctcatgttgattcactcatgtgtatcctgactccaaatagacccagctccttggcacacagcctttcatcgtacttcttaataaccccacagccctaggtgattcctcacacgggtattcaatatttgaccaatctactaatgatcacgaaaaaaaataagatagctgggcgcggtggctcacgcctgtaatcccagcactctgggaggccgaggtgggcggatcatgaggtcagcagttggagaccagcctgaccaacatggtgaaatcccatctctaccaaaaatacaaaaaaattagctgggtgaggtggcgggcccctgtaatcccagctacttgggaggctgaggcaggagtatcacttgaaaccagaaggtggagcttgcagtgagccaagactgcaccactgcactctagcctgggcaacaagagcaaaactccatctcaaaaaaaaaaaaaatttaagataataatgtaatacctacaagtacttgaaaacaggagtgtgattcagaaaatagggaataacgttttgtcaaaataagcctcaaaacaaagctatagcaatccttcgtaaatttaacacgtttggttccttaatacatcccattttggtccctggactattgcgggaagtcagggaccatgaacggagggacctgctgaagccgtgacagaagaatatacattgtgaagatttcatggacatttatcacttccccaatcaatattataatttcctatgcctgtctttactttaatctcttaatcccatcatcttcgtaagctgaggatgtatgtcgcctcaggaccctgtgatgattgcattaactgcacaaattgttcgtaaagcatgtgtgtttgaacaatatgaaatctgggcaccttaagaacaggataacagtgattttcaaggaacaagtgagataaccttaaagtctggctgactgtgggccggtgaggacagagccatatttctcttattaccgaaaacgggtaagagaaatatcgctgaattctttccccagtaaggaattttaataattaacagccctgggaaaagaatgcattcccgggaggaaggcaggggcgcctcttaaatggccactctaggggtgtctgccttatgcagttgcagataagggatgaaacacgccctggcctcctgcagcgcccccaggcttgctaggatttggaaattccagcctggcgaattctagttaaaccggttctctgctcttgaaccctcacaatgtgtgcacagtgggacatggaagttatttagtgattctagtttcgcgctgaccttgtgatcctgccctgaccttctgccttgtgacctcttgtcatccttgaagcatgtgatctccatgacccacaccctattcgtacactccctcccctttgaaaattgctaataaaaacttgctggttttgcggctcgggggcatcacagaacctgccaacatgtaatgtctcccccggacaccagctttaaaatttctctcttttgtactctttccccttatttctcagaccggccaacacttagggaaatagaaaagaacctacgttgaaaaatcgggggctggttcccccgatactggacatttatgaaaattagtaatttttcttttttttttttttgagaccgagtctcactctgtcacccaggctggagtgaagtggcatgatctcggctcactgcaagctccgcctcccgggtacacaccatcctcctgcctcagcctccccagtagctgggactacaggcgcccgccaccacgcccagctaatttttttttttttttgtatttttagtagagacggggtttcaccatgctagccaggatggtctcaatctcctgacctcgtgatccacccgcctcagcctcccaaagtgctgggattacaggcgtgagccaccgcgcctggccaaaaattagtaatttttcatgcatttccctcatctcacggtccgtagacacaagtcacagcagttggctcctctcatgaaacttcctgagcaccgcaggggcaaggcactgagtgtggctcaccaagaaacctccatccccacctgggctgccacatggcggaaagtcaataaatgagtcgcctggtttaccggaatcctcactagcttcagaatcctgaagacccatagcagacattcattttcctgaggcataatctgaaccaccagggctaaaacctggtatgtggacacaaggccctccagctagtgagtgggcctagccagccacccagcacagcatctcacggcagctctaccacggtctgtagatacggttacccagcaatcccacagagcaattcaaacgtttctctgtgggaaacagcccgagtaagaaaatattttatgcaagagaattcctgccactgactggggcatccacaaaggtctcagtgtgaatcgagccttgacagtatcaaggccccaggccatgtggggacgcggagccgtcctactcacagtgtctgcagaagccccactcgtggtctctgtcgtagtccgcagttgtgctacaccacagcttcgccctgctctctatgatgcactcctcgtagctcttcccattgaatatgaaggggaagacacaggggacgccgtcatcggtttctggaaagaagaagaacattatcagtgtggcagctgtgcctcgccaggcacaatcacctcagaatgcagcagcagtccctaaggaagctgcccatcctaaagcacctacgtgacaaccggcattcacctgccaaaactcaccaggcaactgagagaacacagcgtgattcacacaccagcattcacaccgggggtgtacagaggaacagctcacattcacgcccaaggttacagcactcataggaccgtggagctccactccgcagcttctttctgctgctatgtctaatttctagtttactatgagcttgaagtttatttacctcattgcaaatatttacctggagggcaacgatcaccattcacgtaacttaaaacgaccgcttcatcctggtgcctgtaatccagtttcattgattgcagccgtccaaaggatgcccccttggtgcctgagagcagacagactcctccgtccttacagcctccttgttctggcccgactgcaaaggtgcacaccccaacgctgtaggtgcgcgagtcgcgagtcacctggacaaaaaccatgcgtggccgtcagcagagtggcagcacccaggtctcaaagtgaagagagaaccactattgcagctgatgctggaggcaggttcatgaggaagagcaaagactcctctgtgtgcatcagagccacgcaatcgccttggccctaggctttccctggggggcctcccccaacccctaggcccagcttgcttgctcctcctgctccctgctgggggcctcggccacccctgccagccagccactgctctggctgtcgtctccagtcagagcccagtgagaagggacccagcagtggggtcaccccacctccctcacctgtgtaataagacattgtgcgggccaagtgagtgaatgagcagagccgacgctgcacgctgaagcatggacctgactctcctggcccacccagcgcccagaaggctcacacctactgcacacctgtcgggaggacctgtacccaggcagagggctccatcacaggagccagggtgttgacacctgggcccaaaactccaggctcatcactcaccagccgccgtgccacagcaggtgctggggttccgtaccccagtccaggcactggcatggtaacatctagatatctaggcttagggagtcaggggcccccaggcaccagtgaccacgacaccacatcagtaagaccagcagcccaaagaatcagcacacgccagggctctggcatggcatggaggcacatgcccaagtgcctctcaattccagggcacctcctacctccctcttcccaaagctgccacaatcagcaaacaactgccttgatcatcttcaaccaggttggaggaattaaatccctgtagatttcagccacccaggagctggccctgtccccatggataccttacattcatgtctccgggctgccccacctgccctctgtctgatacaaagggtcccactacccgcctcatgaggttacttatcatcaaaaagcgttaagtgcagagccatgaggtacaacgcaagtgtcagctgcgctgagttggccacgcaatccaagaaccttcctgagacctggcatgccctacgagagcaccaagatgctgcccagtggccacatacaccctctcagctcacaggtaccacattatccaaaacactcccagcagcctcacagcacctggcacctggtacacctgcaccagcaacgcccagggtgaacgcattaccttaaaggtgctcgtggaaaggctggacaagttgaagctgtagaggagctgctcatctgtcagggtacagccatccatcctcacttcatcaggacagacgacaggagtctcccattcgaacacaaagtcgcactcgctggtccttaacagcttaggcgttccctgttgccaggaagagcacgggtcttaaaaaccccatggcatagggatagatagcagtgacacaccacgtccctacaggggctgtgcataacccacagcggcctctcagagggaagggatgctagacaacagcagctgaaagacccaatgccatcttcaaggcacagacatcaccctgcccttgccccctacacatcctgtgagctccctggctgaatccaggtcttgtcttctacttagagagaaagcctcaatgttctgtgctacgggttcaaaggaagaaagggggagggcttatatgtcatgagagaggtctgtgaaactgagaccctgcctcacaagtgctccaatctactgtctctagacacgggagacatttattcaaggggcaagatgccacatggccagatattccataggccaagtattgtagaatcactttatttattccctccctcattcaacagcaacaaaaaaagatgaggcagctctcaggaattccatttgtaattaatgttaagcatctttttccctatgattcagtggtaaaagtacttccattgaaaatgaaaactgctggggaagaaaaatcttctaaaaatctttctggaacgctagaacacacattcagcataagatgcttcatttctaaaatcaagtaaacactaatcaccctcaatgtgcagctgctgagaattaactaaaatcacattagctaattcgatttgtcacgttggcagcagagtcaaagcaaggcatagttccacactctttagctggtggtgtagataacaaagcatcactcatgatgaggtgggtcttagaagtgaagactgtcctttaaagaacgaagaacttaatgcagaagccccccgcaaggcaaaatccacgttgccccatgctgtgtgcatctacagaggcacacccagacacccctataaaaatatgccaatacgcttataaacagatgcaatgggtggactgaatacagctctgcctttccttactaactaggactgtcactacactctaagattcatgaacacatccaagggctttgaggtgctctgggcccctgtggagtagccccaaacagcaggactgtttcctcctccttctcaaatactgtctctctcactggtcaggcggctgccaggtcactttctgtcactgtcagcacacccatgtctaacagtccctttacaaacctgctccaggcccaaacatcagaaggatgtctttatcagaattacaagacacccaacagatcctaatccatcacctgaactcctaggggtcagatgagccttggaatccaacatctttattaggattttaagaggcaattctcacacccccagatcctgtgatcaaacatattaatatttctgcagctagatgtatcaatatccacattaggtgggacaaatccacaccataaatagcctcagtccattcatgtcaaaggagccccaagttttcagagcttcagagatttcagaagcacagacgacaggctgtggtgctgtgtccctggagcaaagagctgttcccctgtgcagtagctgggacctggctctgcccctgcagagctactctgagtccctgtggaataggggccataatctaccaatttatctcacagagcagggatcaaaagaaaacgtcctcaaagactataaccaataccgaactcattataatggaagctggtattctttttttaatgcacataaaatggaagtcaatacctcattataagtaaaaggtgccactttgttgtagctattctgattccaggggtcttttgttacttgttaacttctgggctatgtcctgagtgactatagctgcccaaatgtctttctgacttcccagttagaataaaatcagtaattgttaaagtaaaaacaaaagttatgacacttttatgcatcagcagtcaaagctgaatgtcatttctatacttgtgttctatgtttttaaattacagcaagtttctatatgctgttaactgcgggggagctcactcagccctcaatcagtggtttaaattattcagacacactactagcgtaccatcttacccaaggcagacattttgaataagagtatccttggacctgacacgcactttctggttgtctagccttggctcactaacccgcagttgagcatctagatcgtcacaggcccacacttaccatgctcacacctctcttacagtgaaacgcgatgagcgaggtgtagttgaaatgcttgtccgctaagcaaggagtactgctttcaaaattcaagtaaatctcatttgctattggattgagtattggtggtcctgctacccggccgatatcctaaacaaagagcgagggcaaacagtatttcaggaaattaaccattcccaaggttagtggaattaagaattgatacagaattgcaaaaaccagacctcataggttctgagaatgagcagcatctaaagaaactgggtttataccaactccagttggaaggcttgacagatgctgtgtaacctccgtatgtcagtggttatcgttttgatcctaacgttagttctaaggttggttctatttctaggtatcttcaattttcaaagatcctaagcaataggaatctctccagtcacatcaaggagactacagagtcctcccatcagctgatgagggaagcccggaacctgaaaaacctctaaggatgctacacggtcctcccaccacctgacaggggaaggccggaacctccatgctgacctgccaccctcactgcccagtgctgccccgggactgcccactgacgtggcccagcagtaaccactggctatgtccttgggagaggggacaggaggtgttcactgttcattttcattgcttagcacagcacctggcacacagcggctgcccaagagatatttttgagtgaataaacaaataaataaaagaccagtctgagtattatgagaaaaaaaacaaaaaactctttttttatttttaaaaagtaaataaaggtgaatggccaggaactgtgtatgtgatgaatgtgtgtgtgcatgcacgtgtgtgtgcatgtgggtgtgagtgtgtgtataagcagcttccccatgattttgttctcagctacagtgctcttcattcaccactgtggggcacgttcagaccacgtggcaccacaccttctccagttaaataactttctacatcttttaacatttgacaatgggtggccaggcaatgattcccgatcgaggatccccggtctgcgctgtcagaaaggacgctaccaaagagcttcctggggagactcagcttgtccaggcctccatctcacacagagctggagctgtgctaattcaggctgtggccgatctccttacacactcctgacatctccccatatcactgccacatataatggccatctttctaaaggacatctagatatgttacaagaggatccatctttaaagcataatagatgatacagacagaaatacagacgacttgtgagatacattcaaatattaaaacataccaaggatttgacaaaatatgaatataactcatggagacaatttttaaagatccaaatttctattaaaacatgctagtaagccaggcactgtggctcatgcctgtaatcccagaacttcaggaggatcacttaaggccaggagcctgaggccagcctggctgggtgacatagcaatactcccatctctacaaaataattttttaatgcataaaaccaaagcttttaaggcaaaatatttagctattagcaaacgtactcttgcccttaattataactccttgccaaagaaactgtttgcatttcgcaagcgttttaactacagaagacaaggcatttcacacaaagaaaccaggctagggcaatgtgctttcctgtcacttcacctaaaaacttcttgatttgggtcaaccctgaggctcatgacaagtagagtccctacacacatattcgtgttacctcccatgctcaaagactggctggctaccatcatcagcgaacagttcaatgtgcaaacctttaatcttccagtagcggacccagaacatacacagtcccacttactttctccattttttttatgcttgagcaactccccactgaaggcaagaaacaacgcaaaggttatcactaaaagtcttgcaaaaattatctccacccttggatttgtcatacttactatggggggaccatcaataggaactttgcacacagcggctccggcaggacagggcactccgtgcatgggatttagtggctgacaaatattgatgtagaaatcagggttggtatcggaggcatcatcctcactctcatcataagcctcataaccaccagtgcgatgaataaggggagacaagtcaacaatagagcttccattcctcacggaacattcggtctgttaagtaggaaagactgctttgagtctacaaaaaaattttcctaatcaccactaggtcatccataagaatttaaaagctgaataacaacaacaaaaaaagtagaaaggtgtcaaaatgcttcattacatagcactgggcacttccagtcaactttattattggggtgatcaggagtggacagttcagctgggcatctactagtgggcaagtgaacctgacgaaggggcccgggtgcagccaggcactggacatgcacttctcccgtgcccatctgaaaactcaccgcttgctcgcaggccagcggcgtgtgccaggagaagaagagagtgcatgtctgcttgtccagggagatgagcatgggcctattggttggcctggcctcaggcctgcacacgaaactgatcacactcttatagctcaggccggatttggagggacaaggggacccatccttgtacaccagctgcaggacctggtccacgtatctcagcctcttgttggccttgcccacgctaatcctggtctgtccaaagcaggcccctgcaccacaagggaaaggcggagaaaacacaatcacagactcgatggccaattttctgatgagaactttcgcaagtcaggaccatcaatttcatagccaacacttataacttcaagtgtccaatccggctttaaccattgttttacattgaatgttcattccatcacatgaccatgtgtcccccacatggggtgactgctgcaggagacaaaagcgtctcagcttcctggctctgctcatcctttttgccattagcatgcaaagagactgaggacaaccccagaggacgggagagtcagacaacacacgagagaccacagcactcacccacgccaggagggcagttttcattctccccacagatgctcatgtaaaccaaccccttctcgctgtaagcagctgtgaatcccgccctgccacttaaggagctcagatcaaacaggtgtcctgtagggtggaagaagatggggacacagtgactccagggagctgagacttgggaggctcatcatcggcgagctcacacacagattatgtcagcatcgggacttctgacttctcaccacgacccctgtcctaaatcctccaccaacagccaggctgtatcatgagactgtcagtcccttgatccatgagatgtcccatccttagctgaaaagatcgtggctcacagcaccctctgctgggccataccacagcagccactaagagtctggtgggcatggggagagcctgcccagcacacctcttgctgccaatggactgtgcctgtgcctttctgggtgcccagcacaagggcaggtgagagactcctggcaatccactacactgatgctgaaaggcagccaggggctagctctaacctgccctggagagcctagagctgctggactgacactgtcagtaaccccagtcaggagcacctctcacaccaggagagtgacaggagggatggattctctgtgggagcattctctcctccactgaaggagagccaggagaacacacagcagcccatccagagaaaggccaaacacacccacacaccatgacacctctgcccagggcgcctgctgcccatagcttctctttgggtctctcccctgatgagctgggtttggtgggggcaccgtctctcacctgcgctggggttaacgactggcaccacctctcacctgtgcttgggttggtgacctggcagtcatcatgctcgttgctcttcatgggacaggctgtggctgtgggccaggcaaaggtgtactcacagtcctccacggcgctgatgaacatgggcctggagttctacaacaaagcacagacaggtcctgaagggatcacgcaaaaactccatgtctatcatgatttcaacttacaagtggaagcttctctgaaaaactccacagcatgtgacatttctgtctccatgtgcctgtgggatgaggcgcagattaggaaaagcaaagggtcagaatgtgtcctgagctgccaccatgggcttcccctgcaggtaagtgaaacacccacaggcagcaacacacttaggggaccaggaagctccctcaggctgaggaacaggacaggggttggggacaggcgtgcaaaggatgctggaagggctacagggagacacaaatgtgtaaatcattgataaaattctaaaaaccaaatgaggtaaaatccattatcacagtcaaaacaaaaagatataccaagagaactagcccattccacgcatcctcccactggcaccagccaaggcttactctgctcatctcaaaacgcttcatgtccactgcagagttagcatgatgagttcagcagcaccttccttcccaggtaaaccccatgattcctgctgggcaccctgataagccacgctgcagtccagcctcccaggccctgggcacaggggcctcgacacacccccacccttccctcccagcctcctgggccctgggcacaggggcctcgacacacccccacccttccctcccagcctcctgggtctggggcacagggcctccacacacccttcacctttccctcccagcctcctgggtctggggcacagaggcccccacacaccaccctcatccttccctcccagcctcctgggctctggacatggggaaccccacacaccccttcacccttccctcccagccttctgggccctgggcacaggggccccacacaccctctcacctttgccccccacatgtggggcagcccttttgtcctcggccatgagcctctcaggtcacagaggagaatgctcagaggccccagcagctcatgagtctggactaagcctctgcacaatcttcccaagaggaaacttccctgccgctccaggcaagagggcaggcctgaagctcctggagccccccatcccaagctcccctaccactgctgcccaccgctggagagcatggggcgagccaccctgacacccagcgagctggtcttgcccgagttaatgcccaactcagccaccgagcttgtcatgcacgctagcactggggctcaccacaatctcacacacagaaaaacctgtatgcagtcgacacctgcttacgtgcatgccaaacaagtaagggaagaactgatcacaggcactcatgctcactgactgtgcatctcccgtgtgtcagaaatgacacctggcacttcctacctcttctctcgaaaccctgcaatgggcaggacaagtatgcctcatgttatgaacggctgagcagggcagactacctgagtaattaaccaagttatgtggctgggaagtggcagcgctacctgtgacccgggcccagccaaccttctcgtgcttcccaagctgccgccgtgaagacaaaagggcatgtagtcaaacaacaatctcctccacagcctttaggggtctgagtcaaactctgaagagaaccaattctgagtcgggaactgccaggcaagcttctaaggagccagacagcacgagggttccccagattgcaggccgcggcgacgctgttcccccaacctctggtaagggcgcatcatcccaggctctagaactcgcatcccaaggcagatgaggacgtgcggctcaccgccctgcacatgggctcaattcccaaagctgcaacagcagaaggtgcaggaacagtcccttaccacttggctctcgctgcaggtgaatcggatggtggttgactttttccgaatcccatctggacataagtcgccatcaacgtatttcaggacaattatgccatctctccactgaggtccgtcccttaccctgccgaggttcacgggcttggagccacccagcagacacgcggctgcttctggagggcacggctctgcagcaccagacacaagaaagagttgcctttagtgactccccaggctagaacagaacttcatcaggcaataaatgtcacacacgctgcagaacttcatacgctttctaagagtcacttcaaaatacctgctatttctttcacataagtcagatgacaatgacatcacgttagttctcactcacttacatgctgttttgtcacagatggactggggcaggcgggcgtgagtgtagaggaatagctaggctgtagcagtcgaaattctttctgaaccccatataggatgaaggttatattcccaaattaagacagaggaacattttaaatggcctacgtccatgcaccttctttattcaagaagctaccaagaattctgcctgtttcccagtccctaaaatgcctgtgccatgtgccctgggtgaagaactagtcccatgccacaggggtacagccactgtcgaagtctgcacagcacaacgcagcaaggggaagtggaaccacagcctcaaaccacacagaggatggaaccaccttctgcagctaaaaataaccacaccgcctttgaggtgagccacccaagatgcaggtggggctgtatgaaactccacgaacatgggatgagtttcatcttcagggttccgaggggccatgagtggtaccaagatccctggaggtgcccttggtttcccatgtacagctgacatccagtctcagccaaccaccgcaggtttgagtgagctgtccctgcatcacaaaaggaccgaccatacaactctcaacatacgcaggcacacaccaagacctccacgtcacaccccccatcttctacctgctaagaaggattcctcaccatggctattatttctatctattatatcttcatctcctcatgttcagaaagggttatcatgttcccagcagtcctcagcactgatttaccctgggccatactagggatcaactgttaacacccttaaatcattcttcgtcctgctgtttctcggccgaaccacgtccatgctgcagagagtaaagcgcctccaaagaatccccatcctacttgatcttccctgataaactcatgacaagccaccaccccatgaagaggccctctctcaccagtgccagccttcaatacactcactgcaaacaccatcccacgaggaggccctctctcaccagtgccagctttcaatacattcattgcaaccaccaccccatgaggaggtcctctctcaccagtgccagccttcgatacactcactacaaccaccaccccacgaggaggacctctctcaccagtgctggcctgtgatacactcacagcaaacaccaccccacgaggaggccctctctcaccagtgccagcctgtgatacactcactacaaccaccaccccacgaggaggccccctctcaccagtgctggcctgtgatacactcactgcaaacaccaccccacgaggaggccctctctcaccagtgccagcctgcggggccagagacttgcagacattgatgaggtagtgctccgggtcccccgtcccagtgatggcttcccagttgtcactgtaccttgacagggacgagaggtcgaaggagttgccagccccatctctgaaaagaagaaaacccgcagttagttaggcttggtcgtattctctttaaacattgggcactctgtctagaaacgttcaagtattcaggcatagtctaagcctgacagaactttagactcgacttctctctgtctctgtcacacacacacacacacacacacacacacacacacacacacaccccccatcagaatcagcaacaacataacttccctgaacataatagttcaggaaactattaggctcacttaaaaaaaaatttaaattttaacagaaaaactcaagtctgcaaagtgcgtgccgtctgtgctcaggccactgagaagtggaacttgctggtgacaaaggtaagcagccaagatgctaggagcacacacagcaggggccatgcccggggcagccgcacgccacctgttgtttaaaaccaaggccgccagcagttactgaaattctgaaattaaaatgggcttgctgacctttctgcacaggctaaaggttcactaactacacaaatcccaaatacagacagtaactgggaaccaaccccatgccaggagcaatattaacagtgagtgagacacacactctgccaccacggagcaggaacgggagcagctacagatgccacctcagcggcagctcttagcgcttcagaggggaataaaaactggtcattcattcaaaagctgtgtgctaaactgggggtactgtattaaacaaaacagtattaaacatcatcaatcttacaaagtttaccaaaattacctgtggaagaaaatgaccgtgaacaagataagacttttaaaaatacatactgtatttgatggaagtaagagctgaaggaaaaaaggcagataagggggatatgaagttcggggggcagaggcagctgttgaaattttagacagtggagccagagaaggcgtgaccgagaaggggacctgtgaatagactctgagagaaatggaatcactgaccatcctggcacccagtaaagcgcatcccaggcagagaacagcatgagcaaagggcccgaggcacataagcccgacatgacccgagaaagacagaaaccccgtgtggctggaacagagtgaaagtgaggttattagagacaacacgggggtcatgtccatcagaggaagaacttcagcctgtaggtcccaatgagatgggcgctcactgcattgaaggtttcagcaagagcgacatggtgggacttatatctcaagaggatcattctaattactgtgtgggactaaccaaacgtgtgacaagggacatggcaaggagacctcggagtggcagctgcagtactgcacgcacgagaggaggagtgcccaaaccaggggcaggtggcaggaagggaaagctgcctgaaggtgatgggacaagaacagagcttagtgaatatcaccaaatgctctaaaagtagtcaacagaagaaacagaaatagaactaacaaagccaaggcagaggaaagaggagaggagaacagcacaggtgaggacagctttcatcttttaaaagagagtcaacagacaccattagaagctgacaaacagaggtttagagttatagaaggttccaaaaagaaccacaagaagaaacagtaaaaagtggagtgaagctaggggttggggagggagaggtgagggtgggtaatttcatctattaatatttttggactctcaattacaatagacatatattaacttttattatgagattataaaattctcctctgatttaattctacttttaaaaacttagcataaaaatatctttaggaaggccgggcgcagtggctcacacctataatcccagcactttgggaggccaaggcagacggaggatgacctgcagtcagcagttcaagaccagcctggccaacatggtgaaaccctgtctctactaaaaatacaaaaaataggctggctcagtggctcacacttgtaatcccagcactttgggaggccaaggcgggcgaatcacgaggtcaagagttcgagaccagcctggccaacatagtggaaccccatctctactaaaaatacaaaaaaattcgccaggtgtggtggcgggcgcctgtaatcccagctactcgggaggctgaggcaggagagtcacttgaacccgggaggcggaggttgcagtgagtcgagatcacgccactgcactccagcctgggcgacagtgcaagactctgtctcattaaaaaaaaaaaaaaaaacaccacaaaaattagccaggcatggtggtgtctgtaatcccagctactagggatgctgagacaggagaattgcttgaaccagggaggaggaggttgcagtgagacaagatcacgccactgcacttcagcctgggtgacagagcgagattccatctcaaaaaaaatacatatatatatatatatatatatatatatatacacacacacacacacacacacacacacacacatacacatatctctaggaaaaatgctttatgtgcaaagaaaatcaaaattttattccttgtatataaatatcagaaaactgaaggcagcctcacatggcagaaagagaactgctaagtgaactggggatatctactgaggacatttcccatccagtagaaatgagaaacaaatttgtttcacatgaaaatatttacaaaatgttaactggaaaaggtaaggttactaaaattatgatttaaagtcactgaacataaattactaaatgcttgcatttacatacgttcctaaaacttaaatgatgatttcacctacataaataaccgatgacacaacaggacaaaggccggaaggaaacagaatcacctgcactttcccccaggaaagtcaacagtgatcaagtggctcatactgggtgtttcacacggcagaacacagggcatccctccaaaaaacagaaccgcagacccacaaaaccaaaatctctaaggatgggaccccaggtgtccagagggcgatctggcaaagctgttgagagcagctctgtggacgatcacatgcaacgaagacctcccttcatcgcaggggtcaccacaccgctcctggcccactctgctcactgacatgtggatcacgcaagagtgccaggggtccactctctgcttcagctccaatcccttccccatgcagtcaccacagcagctccaggtggtgacggagctgagagttaacctagcccgactcctcattttaatatgagcaaaccgagtcctaggtaaattaactgactaatctaatcccctgcacccaagaccactaattattaaagcaaaatcataccaagttagtctgtccaaaagagacaacacatccatggacttacttgaatgaacattcagtcagatcgaaaggtgggcaggcatactgcgttcgccactcaaacaagtaggaacaatctgaagtctcctttagaaatactggctaaaaaagttaagaggcacatatataaaagtgagaatgcaaaactttagtttatactttgagttttaagaatgaaaatagtaaagaatggttacgttcatgaaaatcaatactaactgatgaaagtttcaacatattttctgtaaatggttattttaaactcagttaaccaggagatttgatgagatctgaggacagattctttctaatatgatcccagcagcctgagggtggggagaagaccccgctgagggccgtcggtacatgctcacccgctgggtgccgcggtcacagtagaagaagatggctgtggagcgctgataaaccttatggcaagtgtccccccccgtgaagttcatttttaacaagccattttcataagttagcttctgagtcaggagacctgtaaagaaggagaacattaaacaaggtttggttcgggtccctaggctgtcaaacttagcctaagacatgtgacaccacacaccctgaagagtgtgagacaaagtatccctggcctcccagcaccataccatgcactcctgtcacattacactttgggaataaaatcaggcttccccttgtccaaggctgctgcaacgtcacagactgacccgtgtatgatgacatgaggcattccttagcctcatcacctaagggaatgtcactttctccactgtgcctgagggctgtccacgtactcaccaccagctactttgacttcatttttacaagttcctaaatgtatttaaatcttgcccaactgctgaaacagcatgaatgaccaacagcgtgccctgtaatttctacagccaaacctcgtactaaatgcattccctgtgactcaatgctatcaagtactaccccagaacatccaacactggctagctcactgtgtcccaacgttgtaataaagaagagaaatatgaccttagagtcagtaactggcatggctaactaagaataaaatagacatgctctaccaacatccttcagtatgtactctgtttaagaaaatcaagcaaaatccgaaatatcattaatatgcttttttttttttttacagtagaacactcatgtttctgactcaagggaaaattcatcttcagcaaaatattttaatattttaattccattcctttgcaacaaaaggaaaacgacaaacaatggtacctgccactttgtgaaatccctgcggttcccgcttttcctgacatgaggagaccaccttggacttgtcacttgtggggcagacgtctgaggaaagcttcccacagacccggaagtaataagtgtattcgccagcgctcacgatggtgtcgttgaggcccaggggcttcaggtcatacaagttgccatgccttgggtctttcacctcacagttgtccccttcaagaacatggaagaagtgaagggcaactgcaaccacacacgcattcacattttcaagcaaaaagctttacaaatggccgggcgcagtggctcacgcctgtaatcccagcactttgggaggctgaggcgggtggattactaggtcaagagatctagaccatcctggccaacatggtgaaaccccgtctctactaaaaatacaaaaattagctgggcatggtggcaggcaccctgtagtcccagctactcaggaggctgaggcaggagaatcacttgaacccaagaggcagaggttgcagtgagccgagatggcgccattacactccagcctggcaacagagcaaaactcggtctcaaaaaaaaaaaaaaaaacttttacaatttttggttaggtaaataccagctataaatgggcattaaaagccatttccacatgattttgtttatatataatacaaatcgcctggcaaacagctttctaggaaagtctaggtccccgaataaagacttgcttcatcaaacaacacaaaaccaaaccccacattagtgtcttcaagcatcagacgccaaaatcccatcaatccaggcacacaaggaaaatgtcactcgtgaaattagcaatatgcttcagtaaaaaaaaaagctcaaggaaaagaaattatcctccccctagcgtgtgtctcatgaccccagctatggctgttatcacacggtctcatatctaaggcatcgttcagaacgtctgctactctatacatttaaaatgacttgtagggacaggcccagtcctaccttccactctgacaacgggacaggcttccacagttctccagataaacacgtactcacaaccatcctgaagctgaaatgctggtgagccctgtaatataaatcagcagcctgatttgtttcctgtttattttaaaaattaatcaaatggggccgggcacggtggctcacacctgtaatctcagcactttgggaggccgagacgggtggatcacaagttcaggagttcaagatcagcctggccaagatggtgaaaccccgtctctactaaaaatacaaaagttagctgggcgtggtggcaggtgcctgtaatcccagctactcgggaggctgaggcaggagaatcacttgaacctggggggcggaggttgcagtgagccaagattgcaccactgcactccagcctgggtgacagagtaagactccatctcaaaaaaaaaaaaaaaaaaaaaaattaaataaatgatagccacagttagtacccaatctttgacctccatgtgcaaactacgtaacatttattaaacatttaagacctgaagaaatgagtgcattctcgtcaaaccctagcaatggctgaaactccacgaaaacacaggcaagttttaaacaagatagaagattcagaggttcaagggaaatgggaaatggagtcacccggggacaacatctcattgctggtctgaacacacaccgatatctgagcacactcaaacgtgatcctggtggagaagcgctggttcccacacttgtcaccgttgacatacatgatgctcaaagatccattcgccgcggcttggggactcatctgcaccacacccagattccagctattgccttctgacactaagcaagaccccactgcgctgcctggaagaacagaataagtggtttgggcatgaggaaggcgatgaccttgagtcaaatgctctaataaaatgaacagacgccaatcaagagaccaaggagaactcaccctggcatccaggaatgtaagggagaggattgcaaacgctcaaatagaaagtcctctttctcccatcgacagaggtgtcaacagccgtccaaggtttcctgactgtgcttaggccagtcaggtcgtactcatttccagccaggtctgaaacacaacaaaaaaccacgctggagaactctgcctccttgtgagcactcaagaactgcctttcaccctaaataagccctgaggaggcgtgaacctggcattcctaactgtgaggataaggaaatccacgggaggctgagaggctttgcctacaaaacacacccactctgtccctcaaaactgcccttcacagccgggcctggtggcatgcgcctgtagtcagctactttggaggctgaggcaggaggatcacttaggaccaggagttcaaggccagcctgggcaacatagtgagtccctaaagactctttaaagaaaaaagccaaacccccactgcccttgacaaggaagtaccactgttgcagagcaggcagggtcaatcccagaggtcaaggtctcctgtatacactgtcagcttccagggcacagcttagggagtttaacatctttttctttttttttcaccctcaaataagaagctctgacagtacatgtgaaatgtgtttcctctgcattttcttctctgttcttaagatgtatctgatcccaaaagatagcttaaaaccattaactatatagtcagattctcttcaagaaaaacattacaactctaggcatcattcaaagagaatatataacagaaatgtcacgctgcctgcataaccaagcatacacaccacacacacacaaatatacatacacacagaaacacaccttcatatccactcacacacacactgactcttgaccggcctctcagttcttaggccgcacggccttaccggtgacttggcagtccactggagaaggaacacaggccaacgcggtttcaaactcaaagtaagtgtttcggatcccttgcccagagtcgatatcttgatgcaggaatttgaggggccctgagtaaacatcatcattgcaaacaaagcggacgataaaagcatcagcggtacctgtaaagcaagaaggcccagattttaagagacagaacagtattcatggcgcagcccacaagcacagtgcagcaacaggacaaggctgccactggcaacaagcttcacagccgttcgtgggagcaatgacaccagggcaccaagtgtgtatcgagggactcgacatgaacaaagtggtcacactcgctacaacagtggcctatgacaggtttacacactcactgcaacagtggcctgtgttacaacaggtttacacactgcaacggtggcctgtgttatgacaggtttacacactcgctccaatggtggcctatgtgatgacaggtttacacactcactgcaacggtggcctgtgttatgacaggtttacacactcgctccaatggtggcctatgtgatgacaggtttacacactcactgcaacggtggcctgtgttatgacaggtttacacactcactgcaatggtggcctatgtgatgacagctttacacactgcaacagcggcctatgttatgacaggtttctaccataagcctaacatcctggcattcctactcttccagaaaatatttaaatcccacgagtttaccaatccaagcattagaagacaatgtaactctaattcgttggcttattgaacaaatactaagttcctaccatgtatcggaatgaatgaagcagacgaaaacccctgcctgcagctgtgctggttgcagagcgaggagcaagtacaaagattcaagaggggagggtgggagacagtgcactttgtttatatcagaaacagggaggccagcgggccaagcgggaagagcagcagggggtgatcatctcagagagcccccacgggcgtcccatggccgtactgtggacactggcttctactctaggtacagtgcagagcctccgagggctctgagctgggaagtgatatgatgtgatgtttcagaaacatcactctgactgctgtgttgaatacaggctacagcagccccccttatctgcggggggatatgttccgagacccacagtgaatgcctgaaattgagaaccctatatatactatgctgtttcctatacacacatacagaggatgaagctcaatttgtaagctaggcacagcaagagatcaacaataaaacagaacaactgtaacaatatctgtaatgacagttacgtgaatgtggtttctctcattctttctcacaaaataccttattattttcggaccatgtgataccacaaaagtgaagccacggataacgggacccctgtattctgcgaggtcaaacgcaggaagaccaccgtgatggctcctgcagcaaggtggacagcacagcccatggtggcgggggatgtgcacatcctacactcaggaaggtgcatggccagccacagagccaccagggccctttttagctacaaaacaacatggctctgagctcacctttggcagagagaggccctttgtaggtcagagtgatgaagccctctgtggacagctggaggcttttctcaattccgactggccttgctggcttccaattcttgagctcttcag

SEQ ID NO: 1270 - DNA, 308 bp, Homo sapiens
aaaattcttttttttttgagacagagtctcgctctgtcgcccaggctggagtgcagtggcgcgatctcggctcactgcaagctccgcctcccgggttcacgccattcccctgcctcagcctcccgagtagctgggactacaggcgcccgctaccacgcccggctaattttttgtatttttagtagagacggggtttcaccgtgttagccaggatggtctcgatctcctgacctcgtgatccgcccgcctcggcctcccaaagtgctgggattacaggcgtgagccaccgcgcccggcctaaaattctt

SEQ ID NO: 1271 - DNA, 323 bp, Homo sapiens
gctttctttctttttttttttttttttggagacagagtctctctctgttgcccaggctggagtgcagtggcgcgatctcagctcactgcaagctccacctcccgggttcacgccccacgccattctcctgcctcagcctcccaagtggctgggactacaggcgcctgccaccacgcccggctaattttttttgtattttttagtagagacggggtttcaccgtgttagccaggatggtctcgatctcctgacctcgtgatccacccacctcggcctcccaaagtgctgggattacaggcgtgagccaccgcgcccggcctaaa

SEQ ID NO: 1272 - DNA, 4062 bp, Homo sapiens
atttttactttttttcctttttctattcttttttttttttttttttttttttttttttttttttttttgagacggagtctcgctctgtctcccaggctggagtgcagtggcgcgatctctgctcgctgcaagctccgcctcccgggttcacgccattctcctgcctcagcctcccgagtagctgggactaccggcacccgccaccacgcccagctaatttttttttaatttttagtagaaacagggtttctccgtgttagccaggatggtctcgatctcttgacctcgtgatccgcccacctcggcctcccaaagtgctaggattacaggcgtgagccaccgtgcccggcctattctttttttttttttttttttttttttttagtagcacttgttgttgaagcatttttactttttgtatttccttctttctgagttactgtggtaggctgcatctaaaatgactcctaagcaccgtaccttctggttttcacatccttgtgtaatttcctcctcttgtgcttgggccggacctaatgacctctttcaaaagaatagaatatggcaaagtgacagaatgtcacatctgagattaggttacaaaagactgtgactttcatcttcctctctctcttgcgctctcacttgctcattccaatgtaggaaattgccatgttgcaatttccaaaggataggtcacaatccaaaggataggtccatatggcagaaaaacggagggtagcctctagtcaacagccagtgaggaacggaggccctgagtgcaacaccctgatagggactaagtcctaccaacatcaacacctagtcaagccttaagatgactgcagcacccgctcaacaccttttatacagccttatgagaaacccagagccaagagacccaactaagctttgcctagcttccttactcatagactctgtaagaaaataattgtttattgctttaaggcaccaagtttgggggtaatttttcatacagcaagagataactaatatagattctgtttgataaatattaacttacacctaactcagatttcactcaaagaaattaatatgcatgtgagaagatatattctttacccagccacgggaggtattgcctaggaaaaacttagatagttgccaaccgattgtatcataatctcacttctgagtttagaaattaatattaaaggactgtagtttccagtcagacttttccatttaaaaaccatgagcttctatttttacaagtcataggtacttaattagttctccactattctgtaaaataatacactcctagttctgtgataactctggtcaattctagaaataagtattcgttagtacaaattaccagagcctgtggatttgaatgtatcaatctgttttattaagcaggccccattttgtgaaactcagctggaaaacgacagtcaacctgacaattctcatagatagttaatttaagaaattcttcttcttcttcttctttttttttttttttttttttgatagagggtcttactctattgcccaggctggagtgcagcggcacaatcatgtctcactgcagcctcagcctccggaatagctgggactgcaggtgcacaccacgatgcccagctaatttttttttttttttttttttttgagacggagtgtcgctctgtcgcccagagtggagtacagtggctccatctcggttcactgcaagctccacccgctgggctcacgccattctcctgcctcagcctcccgagtagctgggaatacaggcgcctgccactacgcccagctaatttttgtatatttagtagagacggggtttcaccgtgttagccaggatggtctcgatctcctgacctcgtgatccacctgcctcggcctcccaaagtgctgggattacagatgtgagccacggcgcccggccgcccagctaatttttaaattttttttgtagaaacagagtttcacgaagttgcccaggctggtctcaaactcctgggctcgagcagtttgcccaccccagcctcccaaagtgctaggattacaggtgtgagccaccacacttggctaattttctttttctttttctttcttttttttttttttttttgagacagtctcactctgtcacctggctggagtttagtgacacgatcttagctccctgcaacctctgcctcctgagttcaagtgattctcctacctcagcctcctgagtagctggaattacaggtacacaccaccacgcccagctaatttttgtatttttagcagagacagcgtttcgccatgttggcctctatctcttgaccttgtgatccacccaccgcagcctcccaaagagctgggattacaggcgtgagccaccatgcccagcctaattttttattttttgtgaagatggggtctctgttgcctgggctggtctcaaactccagggctcaagtgatcctccagtctcagcctcccaaagtgctgagattacaggcatgagcccctgtgcccacccaaaaaattattcttaagctggtgagtacataaatgtttctttattattttttaaatctatatatatgttttatgaagtttttgttatgtgtaatacatttcataataaaaacaaggtttaaaaaaaacaagctttctgacttgttctgatatttaagattttggtaaaaagttttaagttttaaagagtgcatatgggctggtccgagtgcagtggtttatgactaattaatcacaaccagttccagatttctttgttctttctctactcccactgcttcacttggctagcctttagtaaataaataaataaatagagtgcctatggtagttaaccaaaaaaagagtgttttctaagcttccattaagtctatcatacactatcattaattcccctaagactgtgtcaagttacctatttacaaagatcgattgctcagatccttcaaagttcatgaatcctttagttttggatgataaagagtgaaaaaacaaaagttaaagagaagcccacagaaccagagaaaaaaagaagttgccttctttctcatccttcataaacacctgcccacacaggttgatgtcctttttcaaatatttagtcagaccccaagcactacctttgaccctggtattacaagtcccactctgcctttactactcatatctgaacttttaatatctaattacaatattcagtgaactgatattacatgctaccatttttaagtttggaattaaacttggaattatgttgacaaatctggtttgttttagaacttaatacgatttagaacttttgtttattatgttttataaattaaatgccattttttaccttttaaaattatcttcctattttattcattcagcaaatatttatatacctatagtaaaagtatataaacctgatatatagtaatatatccagaaatgttcaggatagaaatgcagtagtgaacagacaagcaagcttgtagtctttaaataaattaccaactgtaatgctgtttgacattatgtttttaaataatgcataacctattgttatcagggagttatacatacctatgtattaccatatatcttccaatataggcttgtaataaagtcagtatactcacgttctcttttctaagcatgtcttaacaggttaaaccacacaaccgtgatatttgtatattatataattaacatcttaaataacagctttgaaatttctttttttttttttttttttttttttttttttttgagacggagtctcgctgtcacccaggctggagtgcagtggcgcgatctgggctcactgcaagctccacctcccgggttcacgccattctcctgcctcagcctccccagtagctgggactacaggcgcccgccaccacgcccagctaattttttgtatttttagtagaggtggggtttcaccgtgttagccaggatggtctcgatctcctgacctcgtgatccgcccgcctcggcctcccaaagtgctgggattacaggcgtgagccaccgcgcccggcctgaaat

SEQ ID NO: 1273 - DNA, 310 bp, Homo sapiens
ttttttttttttttgagacagagtttcactctgtagcccaggctggagtgcagtggcacaatctcggctcactgcaagctccgcctcccgagttcacgcctttctcctgcctcagcctcccaagtagctgggactacaggtgcctgccaccacgcccagctaattttttttttttttgtatttttagtagagacggggtttcaccgtgttagccaggatggtctcgatctcctgaccttgtgatccacccccctcggcctccaaaagtgctgggattacaggcatgagccaccgcgcctggctgagaatc

SEQ ID NO: 1274 - DNA, 255 bp, Homo sapiens
tgcagtggcgtgatctaggctcactgcaagctccacctcccgggttcacgtcattctcctgattcagcctcccaggtagctgggactacaggtgcccgccaccacacccagctaatttttttgtatttttagtagagagggggtttcaccgtgttagccaggatggtctcgatctcctgacctcgtgatccgcccgcctcggcctcccaaagtgctgggattacaggagtgagccaccgcgcctggccagaaatc

SEQ ID NO: 1275 - DNA, 4635 bp, Homo sapiens
taatttttttttttttttttttgagacagagtctcgctctgtcgcccaggctggaatgcactggcgcgatctcggctcactgcaagctccgcctcccgggttcactccattctcctgcctcagcctcccgagtagctgggactacaggcgcccgctaccacacccagctagtttttttgtatttttagtagagacagggtttcaccatattggccaggctggtctcaaactcctgacctcgtgatccgcccgcctcggcctcctaaagtgctgggattacaggcatgagccaccatgtccagctgagactgcatttctaaaggctccaggtgaggttgctgctgtgatgctgagggtcccaggactgcatatctgctgcagggccttgccccttccaactcctgctgccttcttgacattccctcccctttcactgagcttgtgcacagactgtcttctcccctctgggctacgcacccagtttttcctgtctggaatgagctgctattcccccttaccctacacaccccatctcctctttccccaacagcaccctgtgctgaagccttcgcaggatttaccaggctgacctgttagtacctgcatggatgtcttcagagcagagactgtggattgtctatcaccaagttccagcacctggtacaggatctggcaaatcacaagccctcaggaaatatctggggaatgaaaaatgaacctctgagaggagataagatagaaagacgcataatcatcatgacatcatcatagcaaataccacttggcacttactctgtgctggccctgttgttggtgcttgacatttagttaagtcatttaattcccacaacaacccagttttgtagggattatcatcaaccttattttattttaattaattatttgagatggagtctctcactctgttgcccaggctagagtgcagtggcatgatctcggctcattgcaacctctgcctcctgaggtcaggagttcaagatcagcctggccaacagggcaaaaccccgtctttactaaaaatacaaaagttagccaggtgtggtggcacgtgcttgtaatcccagctactaggtaggagaatcccagctgaggtagaagaatcgcttgaacccaggaggcagaggttgcagtgagccgagatcacgccattggactccagcctgggtgacaagagcgaaactcgtctcaaaaagcaaacaaatgaacaaacagaagaacaactccgtaagtttgtgccaagctgatgcttacagctgggcttcaggaccattaactgaggatgcagaagatacaggtggcagttggaagagacagtgggggagggccttgttgagaagctaaggtcatggtgtggaggggaggaaaggagggcaagtatcagagtgggacaagagtgctggggaggacaggatggctgggtaagatggtggcgaggagtgatgggtcctgggagccagggaagagggaggagaaggactgcgcatgagtgtggttgacagagagaggctggaaacctgaatggagcaggaagtcaggcatgcagacaggtttggcaagaaccaggatggtgggagcggggctagacactgtgtgctggatttaaggagaaggcagttaaacaatagggaaacacgccaaaaatcttgaacttgagagtagaactacaggtaacaaaggtgttttgttattctttttaatgttttctaacttttaaaatgagcatgtattcttttgtatctatatttgaatttatagcataatttttcacattaaaaatggatttactttaataggcaatacagccgggcgtggtggctttacgcctgtaatccccagcattttggagggccgaggtggaaggatggcttaagcccaggagttgaagaccagcctgggcaaaaaagtgagacctcctcccatctctacaataaaatacaaaaattggccaggtgctactctgggcacactgcctatagggtagccctgctctgcaaggccagtactaggagggaaaaagaaaaagaaaacaaaggaacaaacaaaacaaggaaaaaaagaaaaaaaaattagtggggcatggtggtgagtccctgtagtctcagctactcgagatgctgaggtgggagattgcttgagtccaggaggttgaggctgcagtaagagtgagccatgatcaggccactgcagctccagcctgggtgacacagagctcactgcagccttcacctcctgggctcaagtgatccttctacctcagcctcctgagtagctggaactacagccgtgcaccactccgcctgggtaatttttgtatttttttgtagagacaggatttcgccatgtttcctgggctggtctcctggactcaagtgattcctccacccctggcctcccaaaatgctggtattacaggcatgagccaccacaccctgcccttttatcttttccttcttcttccttttttttgtttttgagacagagtctcgctctgtagcccaggctggagtgtagtggcgagatcttggctcactgcaacctctgcctcccgggttcaagcgattctcctgcctcagcctcccgagtagctgggattacaggtgcccgctaccaccccggctaattttttgtattctagtagagatggggtttcaccgtattgctcagactggtcttgaactcctgagctcagtcaatccgcccacctcggcctcccaaagtgctggtattacaggcgtgagccaccacggctggccccatttttcttaatgtagatgttcttggtaacttctgggtacatattctttgttagatatatgtattgtaaatattttctaccagtctatgatttgatttttcactcttttaaatgtgtcttttgatgaacagaagttactaataataatgaggttcaatttaataatcatccatctcttatggcttatactttttttgtgtgtcttaagaaattttggtctacttcaaggtcatgaagatattctcctatgcttttttttttttttttttttgagacggaattttgctcttgttgcccaggctggagtgcaatgttgcgatctcggctcactacaacctctgcctccccggtttaagcgattctcctgcctcagcctcctgagtagctgggattacaggcgcatgccaccatgcctggctaatttttgtattttggtagagacagggtttcatcatattggtcaggctggtcttgaatccctgacctcaggtgatccgcccacctcggtctctcaaagtgctgggattacaggcgtgagccaccacgcccggttgatattctcctatgctttcttttagatgttttattgtttttacatttaggtctctgatccatcctaaactatgttcattaatggtgtggtcgggtcacgattcatgtttccctatgtgggtatgtaattgacctactaccatttattcaaaagaccattctaccctgacttgtttgcagtgacactattataataagtcaggtgaccatgtacatgtagatctctcgatttcattttattttattattattttttttgagacggagtctcactctgtcacccaggctggagtgcaatgggatgatcttggctcactgtaacccccgcctcctgggttgaagtgattctcctgcctcagcctcctgagtagctgggattactggtgtgtgtcaccacgcctggctaatttttgtacttttagtagagacagggtttcaccatgttggccaggctggtcttgaactcctgaaatcgtgatccaccggcctcagcctcccaaagtgctgggattacaggtgtgagccactgtgcccagccatgtaaagatttgaaggaaataatgagttttttttttttttgaaagagtcttgctctgttgcccaggttggagtgcagtggtgtgatctcggctcactgcaacctccgcctcccgggttcaagtgattctctggcctcagcctccctagtagctgggattacaggcgcatgtcaccatgcctggctaatttttctatttttagtagagacggggttttgccatgttggccaggctggtcttgaactcctgacctcaagtgatctgcccgcctctgcctcccaaagtgctgggattataggcgtgagccaccgcgcctggcataggaggtttgttaatagtagctgtgatggggttgtaagcttatgggtgatttttcttttcttttttttttttttggtatactccacaccgaacgtagtattaatactcagacaaaatgaataaatatttttctttttttttttttttgagacagagtctcgctctgtcgcccaggctggagtgcggtggcgtgatctcggctcactgcaagctccgcctcccgggttcacaccattctcctgcctcagcctcccgagtagctgggactacaggcacccgccaccacgcccggctaattttttgtattttctagtagagacggggtttcaccatgttagccaggatggtctcgatctcctgacctcgtgatccacccgcctcagcctcccaaagtgctgggattacaggcgtgagccaccatgcctggccagaaatgtttttcaaaat

SEQ ID NO: 1276 - DNA, 287 bp, Homo sapiens
gagacggggtctccgtctgtcgcccaggctggagtgcagtggcgcaatctccgctcactgcaagctccaccttccaggttcacgccattatcctgcctcagcctcccgagtagctggggctacaggcacccaccaccatgcctggctaattttatgtatttttagtagagacggggtttcaccgtgttagccaggatggtctcaatctcctgaccttgtgatccgcccgcctcggcctcccaaagtgctgggattacaggcgtgagccaccacgcctggccctatat

SEQ ID NO: 1277 - DNA, 313 bp, Homo sapiens
taagtattttccttttttttttttttgagacggagtctcgctctgtcgcccaggctggagtgcagtggcgtgatcttggctcactgcaaactccgcctcctgggttcacgccattctcctgcctcagcctccctagtagctgggactacaggcgcccaccaccacgcccagctaattttttgtatttttagtagagatggggtttcaccgtgttagccaggatggtctccatctcctgacctcatgatccacccgccttggcctcccaaagtgctgggattacaggagtgagccactgcgcccggcctaaaat

SEQ ID NO: 1278 - DNA, 6110 bp, Homo sapiens
gttttctttcttttttttctttttttttttttttgagacggagtctcgctctgtcacccaggctggagtgcagtggtgcgatctcggctcactgcaagctccgcctcccgggttcacgccattctcctgcctcagcctcccgagtagctgggactacaggcgcccgccaccacgcccggctaattttttgtatttctactagaggcggggtttcactgtgttagccaggatggtctcgatctcctgacctcgtgatccgcccacctcggccttccaaagtgctaggattccaggcgtgagccaccgctcccagccggaagttttctataaagctttaattattctgtcttcaggcttctctcattccttctacatgtagtgcaacaatgggtgttcagtaaagtagagtgacacagcgaggtcacacagcacattagagggagtgctagaaccagagccccaaatttctcattccccatgttcttttgctcacccatccaaccatccatccatccatccatccatccaacaaatattgctgagtttcttctatgtcagtagctctcaaacttggctgcacattggaatcacctggattccacccttagcaatcctgatttaattgggctagggagaggcatgaatattgaattttttgccttggaacatattgttttatatacaacacagtagtgaatagtgacttcattatggatttgtttctttatagatcacagtggcatataaaattcaaaatccataaacaaagagctcttaggttaaatgagttcttcctaaaaattcttaatggcatgctggtctattctcaagcggtacaattttataatgcaccatcctatatttagcatgtcacatttctacagtaacataatggaggcacaggcagtgcaagcagatttaaaccccttctacttctggactgaaggttagaaaaacacagcgtgtacacacacacacttggatgagttcttccaatacgttttcccccaaaaatgatagttttatcaaagaatttcaataactttcatagtttgtacaaccacactctattagctacattaaaaaggattcaacaaggggccaactacacagtagtaaataaacatgtttgagaatatctgctacattctctatctcctggagaaaataatatttacatttttttgtaaagtgatttaataactaaacaattctttcttttggtcgggggtaggtaatgggattttcaaagcttcacaggtgattccaataagcagtcaatttgagaagagtttctctgtgccagaaactgttcctgatgctgcagatactgcagtcaacacaccaaacaagataattactgacagaaattaaacatgtaattaataagataatatcaggtagaaataggtgctattaaaggggggaaaaacagtgtagtttgggtgtggtggctcacacctgtaatcccagcactttgggaggctgaggcaggcagattgcttgagcccaggagttcaagaccagcctgggaaacatggcaaaaacctgtctctacaattaacaacaacaacaacaaaaaaaacaaaaaccaaaaaacaagcaatgacaactacaacaacaacaattaaaaaaaaccagtgtaatgcaataaagaatagctagagtcagagtcacttttagatgaaggggccaggattaggctttgcagtgccatttgagagagacctaaatcccaaaaggacaccatagaagggcctcaggggaaagcattgctggcagaaggagcatctgaggtgttctggacagtttcccattacccttccagtcctgctctcagtcctctccttgtttgtttcagcacaaggctgaccagtaaggacttcagcagcagggcctggggtatgaggatctgggatgtgggtcttgggatgaaggggtgtctgggatgtgagtcctggggtttgggggaactgagttatagggactaggaagtaagatttcaatagtaatttgacaaaatatattaagaacttaaaaattttctttgatatgatacttccactttcagggcttatatcagatcttcatcacaatgttactgatgagaaaaaaaacctataaaccatctaaatagcccataataagggactggttaggtacattatagtctgtccatttgatatagtgaaaatgtgtgcttcagcaggccatgaacaaaaacagtgagagatgaggctgtataaatgttaacaatgtctgcctgccaaaaaattattacaacatttaaaaggcaaactggaaaaatatttgttacctgtgacaagaattcttccaaatgaggaagaaacatttaacagaaaaatgagcataagacttgaatagagaatttctaaaagaaattgtcactaaatgtctgaaaaaaaaaaaaaaactcagccttattctaaaaggttaaaatgtggtatctttttgcatggaaaaaataattaatgcttaaaagacactaaacaaatgccagtagcattccctagtcagtaaggttttacaacagttcttggacggcagtttggcaaagttaatttttcaccaaatattcattctgtgcctcttctgtgccaggtacagagaagggctctcaatgtgggtgagggtagagattcaggaccaaggagcagtctggagttttcacagagcatgggagattgtcttagtctttttaggctgctataacaaaatactatagagtggcttataaactacaaaaattttattttcctcacttctggaggctgggaagtccaaggtcaaggcatcgccaaatataatgtctggcgaggtcccatttcttatggatgtacagcttctcattgtcaccttacacggtagaagggtgaggagcctctgtaaggcctcttttataagagcacaatcctattcattatggtagagccctaatcacctcccatcttctaatactatcaccttgtgggagtcaggatttcaacatatagattttggggtaacccaaacattcccaccacagcagaggcattaccaacatttagcacccagttgttaaagacatcaaacttcctgcattgattttaggtcataaaaatttctttgaccagagaaatgtaagcagataggagattgtgccagttctgggtgaggtgtcaagaaccattctgtgttccctcactctcctaagctcaagccattcaccaggagaccgcatactcaggcaaccatacctccctccacctgggccctcaagcaagaaacaccagtgagagaccagagcagacctgagccccaagcccagccgagtaccaagcccacgagtgagatatcagtgttggttgtgaccaatgaggtttgggggttatttgttaagcatcattatcatgcataaccttataaactgtacaaagaattgttcccccagatgccataagcatgcccaaccctctgtctgaaaaatgctggatacagaaaagaaagagaacagagctctgggatgagcatgcacagtcaaccaatcatcacagcacagatgacatgacgcatgttgaaataagtgcctttaataatgagttgaaaagtgggatgaaaaagaggaacaggagtaacagttttgagtgggaagttaatgaaagtttctccagggatacaacatgtaagacttgagatgaaagagggttagacctggagcgggataaaggtttccaacagagagggggccatgaatagggaggagcttgcacctgaggggttggagcaggagcactaactaggtgccaactggatggtctggccccatcaggaccttggggaccaccaggaggggattggattttacctaagtgcaatgagagccatcaaagggaattttgttggtttgtttaaatcaaaatttgttttgtaaacatattagttttaccactggtgtgatttagcctttgatctatagaaatggaatttgagtttcaaatgtctccagtggcaggactgcccacaaagaatccctactaccattcacattttggggagggggttaatagcaccaactcaagtactatccttacactgtctagaaatgaaaggaaacaattgactcaggaatttcacttctaaatagcctgcatttacataacagtatccttggaattatagttctatcaagctttcatgtgaaaactaaatgagagaaaatgaaaattactttagaagagagaccaaaaaatactgttttctggattaatcagagacttcctgttaataaatagcaataagaatacaactttcattatcctgaaatcaaataagatgaaaagaattatactaagattcacacatatatttgtgtggatatatatatgggaaaaacctaagcatgtttccctactctctactcacaatcacagagtacttctgacaccagatgtgtggggggttttctccacatgccaaccaagcaactctgcagcaaacaccagctaggtgtcctgttattctgatcctacttacttggagacagccaggtaaagttgggttgagagctcaggataggtgagggctcagtcccaggagcctgaccccatttcacatgccaattacaaactcagattttgacctcagcttctggcccactgactataaaccagggttcccatgattccctccttgggttgtggcattgggcattctggtgagctctccatgtgatctacacatcaggcatgagactttatccctgaaacttatgtcaaattgtccagcttagcagtttttgttcttgtttggagagttgtagcaagatattgaagtaaactagaggaatttaagatccaatcctaaataaataacaaaaacttgaaaacaatcaacagggctatgatctaacaacaagtgtactatggttttcttctgaaacttaatttttctctctattgtcatccccacttctactaaaaataatcacagtaacaccaatttgtttctaaaataagtttagtctcaaacttggcctaattatttgtataagtacagcaagaataaccatataggctccttttaaatttgcttgatgataattttgacaagaaatcttaggctggactttttttttttttttttttttttgagatgaagtctcgctctgtaccccaggctggagggcagtggcgtgatcttggctcactgcaagctccgcctcctgggttcacgccattctcttgcctcagcctccttagtagctgggactacaggcgcccgtcaccacgcctggctaatttttttttttttttttgcattttttgtagagacgaggtttcaccgtgttagccaggatggtctcgatctcctgacctcgtgatccgcccgcctcggcctcccaaagtgctgggattacaggcgtgagccaccgcgcccggcctaaactggactttttaaaacctctcgatgctaggaagtcaaaccaatgcagacatcagactttgcccttaaagccagactctctatgcatgttttcaaatatgacattccagtcaaagctttgataatatagtcaatgttttcagttgtatcatgttaaagagaacagattcttgttgaatttatgcaaataaccatatcatcataaacaaaaataaggatacccatgaattatttcctgagttttggagggatcaggtagggaacaaaagcaaatgtttcaatttttgtttacaaaagtatgcattagcaaattgctataagttatagttagcttaaaagaaaaaaagttcccttgctgggtgcggtggctgacgcctgtaatcccagcactttgggaggccgaggcgggtggatcgcgaggtcaggagatcgagaccatcctggctaacacggtgaaaccccatctctactagaagtacaaaaaatcagccaggtatggtggcgggcgcctgtagtcccagctactcgggaggctgaggcaggagaatggcgtgaacccgggaggcggagcttgcagtgagccgagacagcgccactgcactccagcctgggcgacagagcgagactccgtctcacaaaaaaaaaaaaaaaaaaaagaaagaaaaaaa

SEQ ID NO: 1279 - DNA, 2604 bp, Homo sapiens
tttttttttttttttttttgagacggagtctcgctctgtcgcccaggctggagtgcagtggcacaatctcggcgcactgcaaactccaccttccgggttcacgccattctcctgcctcagcctcccgagtagttgggactacaggcgcccgccaccacgcccggctaattttttgtattttcagtagagacagggtttcaccgtgttagccaggatggtctcgatctcctgacttcgtgatccacctgccatggcctcccaaagtgctgggattacaggcgtgagccaccgtgcccagcccatggaacaccatttttaccagaaaaaaactactgacagacaaaccagggttattcagacttaagtatgtggcagaaattctgtcaaaaatgtaacaaagtgagattgtcacttcaagtaaaacaactgacagtttgtgttaccaatgataaaattctagctttcaagtgaaaactagaattttggaaaatcctatctgccactgtgagcttgacagcttcccaatacttgaagacttttccgactaaataggaagacattaaggaaagtgattgtttgatactgtataatgaaatatgtcaacattaggaagaactgtataacacagtgaaccactaaaatttccgaaggacttatgcttaatgttttaaaaaacaggcatggattcaacatccattcaaagtgtaaggtacaccattggatattaatgtaacagtgtaaaacaagtacattgatatagtttcaaattccactttgtaactaacctttaaaaagctacgatttgtcaaactttgatgtgatatcaaagaacatccatgattatctttaaaaagctattaaaatattcttctttccaacttcatatgactgtgaggtgggattttcttcatcttaaaccaaaatgaaacagtgcagcagcttaaatgcagaggcagacataagaatccagttaccttctattatgtcacacattagttttgcaaaaatgcgaaacagtgccacttctgccgggcgcagtggctcacgcctgtaatcccagcactttgggaggccgagacaggcggatcacgaggtcaggagatcgagaccatcctggctaacaggatgaaaccccgtctctactaaaaataaaaaaaaaaaattagccgggcgtggttgcgggcgcctgtagtcccagctacttgggaggctgaggcaggggaatggcgtgaacccgggaggcggcgcttgcagtgagccgagatagcgccactgcattccagcctgggcgacagagagagactctgtctcaaaaaaaaaaaaaaagaaaaaaaaaagaaacaatgccactcctaggataactgttatcaaaaccaggaaataagtgctgatgatgatgtggagaaattggaatccttaggtactgccaatgggaatgtaaaaatggtacagccactgaagaaaacagtatggtttcaaaaactaaacatagtactatcctatgactcagcaattttcacttctaggtacatacagtatcccaaagaattaaaagcagggattcaaacagacatgtgcacattaatgatcatagtagtagtattcacaatagccaaaaggtggaagcaacccaaatgtccactgacaaatggataaacaaaatgtggtatatacatacaatgaaatattattcagttttaaaaaggaaatcccgacacatgcttcaaaacgaataaaccttaaaaacgctatactaaataaaccagacgcaaaaggacaaatattgtctaattccacttatataagggacctgaaatactcaaattcatagagaaaaaataatggttaaccagggattgggggaggaagtaatgggcagttattgtgtaataggtacagggtttcagtttgggatgatgacaagttctggagatggacagtggtgttggctgtacctctcaattgtacacttaaaaattatcaaaatggtaaattttgttatatcttaccacaattttaaaaaaaagggaaaaaaccccacaatgttaatcttctcactgattggggggcgggggggttggtttggaaaatagttatttttcattaaaatcactatttatgcacctagcctatttattagttttgtaaattaacaactactttaatttttttccagctttaatgtctaatatggtaaatatagacagatataccacacaaacagaagctcttaggtccacggtaatttttgaaaggtaaaggggtcctgagaataaaaagtttgagaattgttcttttttttttttttttttttttgagacggagtcttgctctgtcgcccaggctagagtacagtggtgcgatctcggctcactgcaagcttcgcctcccgggttcatgccattctcctgcctcagcctcccgagtagctgggactacaggcgcccgccaccacgcccggctaattttttgtattttttagtagagacggggtttcaccgtgttagccaggatggtctcgatctcctgacctcgtgatccacccgcctcggcctcccaaagtgctgggattacaggcatgagccacagcgcccggccgagaat

SEQ ID NO: 1280 - DNA, 306 bp, Homo sapiens
ttttttttttttttttgagacggagtctcgctctgtcgcccaggctggagtgcagtggcatgaactcggttcactgcaagctccgcctcccgggttcaagccattctcctgcctcagcctccagagtagctgggactacaggcgcccgccatcatgcctggctaattttttctgtattttttagtagagacggggtttcaccgtgttagccagggtggtctcaatctcctgacctcatgatccacccgcctcggcctcccaaagtgctgggattacaggcgtgagccaccgcgcctggcctcaaat

SEQ ID NO: 1281 - DNA, 27666 bp, Homo sapiens
ggcactgacaggacttgacacattctaatctcctgagggccgctaacaacatagatgacagtctggacaacacaaagggtcaacaggtgctccgagtgtccggcagggctaattggtaagttcgtctcttatacaaggcccgtgggacaagactgggagaggtatttttctttttttcttttttctttttttttttctttttttctgagacagagtcttgctctgtggcccaggctggagtgcagtggcgcaatctcggctcactgcaagctccgcctcccgggttcacgccattctccttcctcagcctcccgagtagctgggactacaggcgcccgccaccacgcccagctaattttttgtatttttagtagagacagggtttcaccgtgttagccaggatggtctccatcgcctgacctcatgatctgcccacctcggcctcccaaagtgctgggattacaggcgtgagccaccgcgcccagcctgggagaggtatttttcttaactaaagtacagaaaataacagagaatcaagaacaatgaagaaacagagaaatatgttccaagcaaaagaacaagataaatctccagaaaatgcccccggtgaaatgaagataagtgacttaccttacagacaattcagaataatgatcatgaagatgcttaccatgtctaggacagcaatgcatgaacaaagtaagaatttcagcaaagagacagaaaaaagttcaaaagaaataacagagctgaagaatacaataactgcaataagagctcaaaagagaagctcaacagactaaatcaagcagaagaaaggattagcaaactagaagataggtcactggaaatcattcagaggagcaaaaatgaaaaagaatgaaaaagagtgaagatatcttaagagagttaggggacatcaagccgaccaaaataggcattatcagagtcccagaaggaggagagtgagaagagatggaaagcttatccaaagaaataacagtcacgagttgcagatcaacatttcagtcaatggcagaccacatgagcacagtggccatagcatgcagcctagctgtgtagtaggctgtcccatctaaatttgtgtaagtgcactccatgatgtccacacaatgacaaattcaccttctgatgcattttcagaacgtatccctgttggtaagcaacgcatacctataatgactgaaaacttcccaacccagggaaggaaatacaaatccacatccaggaagcccaaaggacaccaataagactgatctaaagcaacccacatcaagacacatcataatcaatttcaaaagttaaagacaaagaattctgaaagcagcaagagaaaagcaatgtattatacacaagggaaaacccgtaagtgtaggatttcttctgggggtgatgaaaatgttatgaaattagattgtgatgatggaggcacaactctgtgaatacactacaaacctttgaattgtatgtttttaaatggatgaattttacagtatgtgatgcacaacccaatatagctatctaaaaaaaaaaaaaaaacctaacctatttgtgaattattttgtagaacatgttttctcttttttattcctttattctgttttcctgcagttccctgactgtggtggaataagcttggaggagatgccttcacttactctactgagaggcagagaaaggttaggtatggaagtaaaatgtccataaataatatcaattctgcacctccaaagatgtgtgcctcttacacaaatgtctctataatctgaggggtccaggctacctaacttgcttcttgttgcttcactgcccgttagttcctctcttcactctctaagcttcccatcccctttggatcagcagccaggagcccagtgggagggtatcttacagggcacgttgcacttctgcaggcagtaggccagctccaggggccgcactgctttctgccggctgtcctgcatcttctccagcagcagaagcatctggaaagggacgcttctcctctgctcgtcagctcccctgggcaccgtgatcctgccacacaagaacagccagaaacctccttacatgtagttctcaaagctaggtgcacactggaatcacctgggagaaattttaaatcttcatatccaggccactcccatacaaattaaaccagaattctgggtccggggggcggggcgcgggcagttatcagaatttttcagttcctcagattatttcaatgtgtggtcaaggttgagaagcaccatgtgagtgaatctgctctacaggggaccctctagagagggggatcagcatgactgctgccttggcccctctgcaccctgcccagcaatcgtgctagagcagacggcagatgcacgaggtcctggctccacatctcgggcaagcagcaaaatgtccagcctaaagctctccagactgcagaggcacatgctgggttaggtcctgggaagaaaggcaacatgaaaggctgtccgtgtggtttggcaatgattcatttaatcacaggcatttttcggatgggaaaaaggagagagcacagggcagaaaaggagtgatagagagagacagagggagagagtgcattgtgtgagtgttggtggaaggaggggtgtgtactccccactgacttactccttctccgactttggtctagtcccaactctgtcttttaaccaagtcagtggctgtcaatcctggccgcatttaaaatcacccaaagagggctttaaaaaagtaccaatacctggccgggcgcagtggctcatgcctgtaatcccagaactttgggaagctgaggtgggcaaatcacctgaggtcaggaaattgagaccagcctggccaacatggtgaaaactcatatctactaaacatacaaaaattagccaggtgtggtggcgggcgcctgtaatcccagctacttgagaggctgaggcaggagaatcccttgaacccgggaggcggaggttccagtgagccgagattgcaccgtcgcactccagcctggggacagagtgaggcttcatctcaaaaaaaaaaaaaaaaaaaagtaccaatacttgggtcgcaccccagaccaacctaagaagttttagaaataatgtgtaggccagaatatgcagaagccaatctttcctctgccagcttttgagagaagatctcaaaaagtccaagtcactgtgaataactgaatatattaaaaatgaaataatacaggccaggtgcagtggcttacgcctgtaattccagcactttgggaggctgaggtgggtggatcacgaggtcaggagatcgagaccttcctggctaatacggtgaaaccccgtctctactaaaaatacaaaaaaaattagccaggcatggtggcgggctagtcccagctactcgggagactgaagcaggagaatcgcttgaacctgggaggcagaacttgcagtgagccaagatcatgccactgcactccagcctgggcaacagagcaagactccatctcaaaaaaaggaaaaagaaataatacaaatgctcatcagcctgaagaacagtcttacctcttcaatatcctggtgaagtccacattcattacgaacacctgaatcaaggagttaaggcagcaggtctgtccaatgttgtgtaaaccaaccaggcctataaggggaagagaaaaaaatgctgagggcaaggcctagggtaaagaagttgacaaggctgggcatggtggctcatgcctgtaattccagtactttgggaggccgaggtgggcggatcacctgaggtcgggagttcgagaccagcctggccaacatggtaaaaccatgtctctacaaaaaaaatccaaaaatcagccgggtgcggtggctcacgcctgtaatcccagtactttgggaggccgaggcgggcagatcacgaggtcaggagatcgagaccatcctggctaacacggcgaaaccccgtctctactaaaaatgcaaaaaaaattagccgggcgtggtggtgggcgcctgtagtcccagctactcaggaggctgaggcaggagaatggtgtgaacccaggaggcggagcttgcagtgagccaagatcacgccactgcactccagcctgggcaacagagcgagactccatctcaaaaaaaaaaaaaaaaaaatccaaaaatcagccaggtgtcatgacaggtgcctgtagtcccagctccttgggaggctgaggcaggagaattgcttgaacccaggaggcggaggttgcagtgagccaagatcatgccactgcactccagcctgggcaacaagagtggaattctgtctcaaaaaaaaaaaaaaaagttgacaaaaatctaatgtttttcttaaagctactaaggacatgaagtcctgtaaagtctctcaagtacgaagtgttcattcagcttgcaaacaaatcggagagaagatatcaaacatgaacctttaaaaagctctatcacaagggccaagcacagtggctcacacctgtaatcccagcactttgggaggccgaggcgggaagaccacctgaggtcaggagttcaataccagcctggcctacatggtaaaacctcatatttactaaaaatacaaaaattagccgggtgtggtggtgcatgcctgtaatcccagctactcgggaggctgaggaaggagaactgcttgaacctggcaggcagaggttgcagtgagccaagatcgtgccactgcactccagcctaggcgacaaagcaaaactccatctcacacacacacacacaaaaagttcgataacaagaaaagttttaatatagtccattaggaaaagtgagatgtcaccaaaagtatatattactcactgccaaatgagtagtatgagcaattgttgggagagaaaaaaaaacattagagaaagcataactgagaatatggcttcctttcattcaaatcgttctccacggagctaagtccaaatgtgcatctgtggggctcagggataagagggactccccagtatgtctatgttggactccagcggagaggtctctgcccagttcccactacagggaggcaggaaataaatcagaaggttactttggggaagattcacctaatccagtgtcaccctgagaggctgaaaggcagaaggaacttataagaatatgagaaaaacaaaagataacatttgtctgacccctagcaaccaacctcctcttttccaacccaaccttaggctcagcagaccccacaagggaagtaccactaatctcaggattcttggggaaagggctttggcttacaagataggacagtaagaaagtaacaacctggggtcacaggtgagcacagatttctactcccagactatcaggagcacattgcttccagacagacccatacaaaggtagcagtaaagatgggaactaatgctaagtgcctctagaatcccagcactggcttaaagcagtttccacagatgaccccatttaatcctcccaacaaccctatgtgcttggtactattattacccccatttgtttgtttgtttgtttgagacagagtctcactctgtcacccaggctggagtgcagtggcgtgatctcagctcactgcaacctctgccgcccaggttcaagcaattctcctgcctcagccacctaagtagctgggattacaggcacctgccactgcgcccagctaatttttgtatttttagtagagacggggtttcaccattttggccaggctggtcttaaactcccgacctcatgatccacttgccacggcctcccaaactgctgggattacaggcatgagccaccgcgcccgaccttgtttttgttttttacagatagggtttcactatggcccaggctgtatccccatctaaaagatgcagaaactcaggcacaggaaagcatgagccgtcgaatacaaagctctgcggcttcagagcggagggggtgagccgaacatttacatgcagtcaagaagaggaaaacgggaggggtctaatgaccatgagggtagtcccaggccctgggacgctctctgggctgctctctcttcatgttgctgtcttcttccttcttttcttcaagatctgccggggactgcgaggactcagccaggatggactgacagatttgcctcaggagcccaaacgccttgctcattcgtgatcactccaaaacccccaggccgcagctgcctggcccgcgttcaggacagcacgacttcacttccaggaagcgcttatgtgagccaggcacgatggaatctctgtgaaaatacaatgcgggtaggtaagaattagagaaggaggaatgtgtattcatgtaatccgttctgatgccaaagagcaggtcttagagggagataaatgtttggggagactgactcacagagctctaggctggaaatgacagctaggctacacatcccctaacctgggtcccaggcgtttccattcatcctcagagccgactgccaaatcctaaccgggagcgccctcttgggaaaggacagggaagcgcgcataggactttgctttacaacccaggaccaggcccacttcagtaaaaagccagcactaagcaagaactctcagcccctgatgccaggctggcatacaggggaagcctctcaacccgcccaacacccaaggggacctgcggccctggcagaacagcctcgtattctggcccgcaacactgccggccagctgcagcagtcagataaaccttagctgcaggcaggctgtagctacctgtcggccttaggcacatcctggtgctgggctggtctcatggcatgaattctgggggtgtgactcaatattgtctcagcctcagtggccataggggtacccgtgtaccccctcccccaacccagcacagctgtgtgaagagagacactgtttgcttgggggaagaagaggtaagtggagtacttcgccttggaacccagtgtgtccgaaattggtgggtgcttggtctcactgacttcaagaatgaagccgtggaccctcgcagtgagtgttacagtttttaaagggggcatgtccgcagtttattccttctgatgttcggatgtgttcggagtttcttccttctggtgggtttgtggtctcgctagctcaggagtgaagctgcagaccttcgcggtgagtgttacagctcctaatacggcgcatctggagatgtccgttcctcccggtgggttcgtggtgtcgctggcttcaggagcgaagctgcggaccttcacggtgagtgttacagctcttaaggcagcgcgtctggagttgttagtccctcctggttggtttgtggtcttgctggcttcaggagtgaagctacagaccttcgcggtgagtgttacagttcataaaggcagtgtggacccaaagagtgagcagtagcaagacttacagcaaagaatgaaacaacaaagcttccacagcatggaaggaaacctgaccaggttgccactgctggctcgggcagcctgcttttattctcttatctggccccacccacatcctgctgattggtccattttatagacagccaattggtctgttttacagagagctgattggtccgttttgacagggtgctgatgggtgtgtttacaatccctgagctagacacaaaacgtctccacgtccccactagattagctagatacagagtgtggacacaaaggttctccaagtccccaccagagtagctagattcagagggtcgactggtgcattcacaaaccctgagctagacacagggtgctgattggtgtgtttacaaaccttgagctagatacagagtgccgatcggtatatttacaatcccttagctagacataaagattctccaagtccccaccagactcaggagcccagctggcttcacccagtggatcccacacctgggccgcaggtggagctgcctgccagtcccgtgccgtgcgcccgcactcctcagcccttgggtggtcgatgggactcggcggcgtggagccgggagcggcgctggtcggggaggcttggtccgcacaggagcccatggctgcggggtggggaggctcaggcatggcgggctacaggtcccgagccctgccctgccaggaggcagctaaggcccggcgagaaatcgagcacagcagctgctggcccaagtgctaagccccttactgcctggggcttgcaggccggccggctggccgctccgagtgcgggcccgccgagcccacgcccactcggaactcgcgctggcccacaagcaccgcgtgcagccccagttcccgcccctgcctctccctccacacctccccgcaagctaagggagcccactccagcctcggccagcccaggaaggggctcccacagtgcagcggtgggctgaagggctcctcaagcgtggccagagtgggcgccaaggccgaggaggcaccgagagcgagcgagggctgtgatggctgccagcacgctgtcacctgtcaccaggactaggctcactacagtaaaacccagtactgggcagagcctcatcaccctgatactagaccagtacccacaggcagatctcaccccaccctagtgccagatgagaacccacagccccagtaacagggactggcgatctggcccacatcactacctgacaactacagtggccctgggccctgaataacttcagcagcagcaagcacgccatcacagctgtgggtcttgggcgtgccccagtgctgtgccagtctcggcagctatggccttcaggcataacccagggctgtgtcagcctcagtggccaaagaattccaaccacagtgatgctgggcttagagcaccccccagcactacaacagctgaagcagtcatgggcttagggtcctgaccaatcagcctctccctaatctcctatgggtttcctgatgaaagacgagcccaaacaaagccaggcaatgaagactggcttaggtacctatgtcaatgcacagacattgacacacagccataaggatcaaggtcaatcagagaaacatgacatcaccaaatgaacaaattaaggtgccagtgactaaccctaaagatatagagatgaggcctggcatggtggctcaggcctgtaatcccagcagtttgggaggctgaggtgggaggatcacttgagcccaggagttcaagactagcccgggcaacatactgagaccccatctctacaaaaaaataccaaaaaaatttagacggtcatagtggtgcacgcctgtggccccaaatactgagaagggtgaaggaggaggatcacttgaggccaggagtttgaggctgcactgaactatgattgtgccactgcactccagcctgggcaacaaatgagaccttgtatctaaataaataaataagatgaaataaaataataataatgggtaacatcgaagcactatttcttataaaaggtgaaagccttttatatgtactgtcttatttatccttacacagccatgtgaattaattactgttatattgccatttgacagatgagaaaactgagatacaaagaagtaagtgcatttcccactggcaagtgatgggccagatgtagacaagctggacggggtttaagtccagctaacatgctgctcagagtgaggaataaactcaaccaaatcattggtgggaatgtaaattagtagagccattatggaaaacagtatggagattccttaaaaacctaaaaatagatataccacatgatctagtaatgccactgctgaatatatatccaaaggaaagggaatcagtatgttgaagagatatttgcactctcatgtttactgcagcactgctcataatacccgagatacggaatcaacctaagtgtctatcaaaagaggaatggataaagaacatgtggactatatacacaaaatgggatgttattcagccattacaagagaatgaaatcctgtaattcccatcaacatggatgagcctggagtacattacgttaagtggaataacctaggcacagaaagataaataccacatgttcacactcatatgtgaaagctcaaaaagcttatctcctagaaatagagaatagaaagccaggcatggcagttcacacctgcaatcccagcactttggttggctgaggcaagaggatagcttgaagccaggagttcaagaccagtctaggcaacatagcatgttgcctaaataaaataaaaaatattttattttctaaaaataaaaataaaattagcctagcatggtggcatgtacttgtggtcccagctacttgggagactgaggcaggagaatcagttgagcccaggaatttgaggccacagtgagttatgatcgtgccacggcactccagcctgggcaacagggcaagaccctgtctccttttttttttttgagatggaatttcactctttttacccaggctggagtgcagtggtacaatctcagctcactgcaacctctgcctcccgagttcaagcacttcccctgccttagtgtcccaaatagctggaactacaggcatgtgccaccacgcatggctaatttttgtatttttagtagagacggggtttcaccatgttggccaggctggtcttgaactcctgacctcaggtgatccacccatctcggcctcccaaagtgctgggattacaggcatgagccaccgcgcccagcctggaatatattcttaaattcatgttggatggctcagataacaacaacctctttttcttagtaaatattgactttcaatagttataaacagttgttcttcttacaaggcccagcctaggaggactcaactgaaatgatgacagcagacaattccatcagcaagaaagaggattttgagctcatcattgagggaaagctgatgaaagagagcagagaggttccaggctgcattttccaagatgttgtcctcttctccgccaagacctcccagatacttcagtaggatatagcagtaaaacctcatggagcagatcatttgagcaggctcggtcccaaagggaaacaaaatacagcagcctttcagggtagatcacactggggagacagggaggcggggcagcaaggaaaggaaagtgaagcttaaaaggtctaaggaggatggggagggcaaggcgagcagagagaccgcagctgaagttagcaggggcaataagcatccaccagagaaaacagcctgggcggattccaaggaaggggattttcaaactcaactgctgactcaaaaaaagacccccaggccaggcgcggggtctttgtttgagactctgtctcaaacaaaacaaaacaaaaatcccaaatactaaactaacttagctcccaccctacctgaatttttttttttttttttggttcacgttctctcatgatcttcccgaaatgttatccttaagcttcggggagaggtgagcaacggaaggaactggcccaggcccaccactaaagaagccccaggaccaatcggggtcctcagagaagccccagaagagccaggaacaagctgcagaaaacctggggagggtggggcctccacccaatactccactcacaactggactctctgccaggaaagccaactccaacatttagatgccctaaaaggaacaaaattaacctgccaggaacatgattcaagcagcctcggtgtcttccgacccaccccatcatggcaaccacaattgtagaccgcagtctcgatgacgtgttcacattattttgcatttcttttttctttttttatttttatttttatttttgagacggagtctccctctgtcgcccaggctggagtgcagtggcccgatcttggctcactgcaagctccgcctcccaggttcacgccattctcctgcctcagcctcccgagtagttgggactacaggcgcctgccgccacgcccagctaatattttttatttttagtagatgggtttgcaccgtgttagctaggatggtcttgatctcctgacctcgtgatccacctgcctcggcctcccaaattgctgggattacaggcgtgagccaccgcgcccggcctattttgcatttcttgagtaatcgtaatatgcgggttagaacacacggattacaacactttggatgaaaaaccacataatagggaaattttgggactactctctctcaaaaaaaaaaacagctcgtggaaaaactaggacttaccttctttgaaactatgtttatgttaagcattttcccctttgtaagctcatcattgtgtaaaagtgtcagaactgtgcaacacattttttaacagtccaaaagcaagttctttgataaatcaatatgaagccgtgcacctgtgttactctccctcccgttttgttcctgcgaacacatcggtaacctgcattcactctccatccaactctgttcaataccagaaagaaacttcagatgaaatgcttttcagtatttgccttgttttctggaacaactttaaagtacaaattatacctaaataagtacaaattaaagcctctgctttaattttcaaacactttgaacccagattttcaggggtctcaaaatggagttttgtgtttaaaagtctaaatttagctttcttccaaggaaaagggtgtgaagaagagaggttaagactaaaatactctgatttgcagagtttgacaacatccttccaatttctcaatatgaatgcccactgacccagccattccacttctaggaattttccaccgatatatttgtatgaatgtatacataaaattatattcattgccgtatctgtgccagtaaaaactggaaacaacctaaatctccatgcattgtttaaacaatgtacttcccataccatgtatcaggtttttttgtttgtttgtttgagacagtttcgctctgtcgcccaggctggagtgcaacggtgcgatctcggctcaccgcaacctccgctcccgggttcaagcgattctcctgcctcagcctcccgagtagctgggattacaggcatgcgccaccacgccaggctaattttgtatttttagtagagacggggtttctccatgtctgtaactcctgacctcaggtgatcctccctcctcgatctcccaaagtgctgggattacaggcgtgagccaccgtacccggccgaatcagttttttgttttatttttaatgccattaacacatctatatgtcctgccatgaaaagatgtccataatatactcagtggacaaagcaagttcgaaatgattttaaagacttgtacatagaaacatttctgataaggtacaaacaaaaatgatactgagtggaagactgcgagacacatttgtctgcattgtttgaatttttttacaagcttacaacacttctgcaatttctttttttgttttaattaaacacaaagtcatgtcaaaagtccaaataactatattagcttagaaaaaaattcactggcccaaaatatatgcacgtagtaaatacagatcactatcataatttgcagagcacaattattacttaattccttaattatctgactggcataggagcagagttggatgtctgtgctagaaagaaaacttccaaaatgagccccgaacttgcctcaagcgccatgcaagcgtccagcctccgctgctgagttccacgtcgggactgagccggggaccgagctgggaccgaagttccgctccgggcccgccttggtctggccccgcgctcgtggcaccccgcccagctttcgttttccactgaatggaaagcgaaacttacagcggcctccgcgccgggagctgggcgccagcgtgcggggaaaccctgccggcccgagcttcccgcggctgccgttgcagccgcgcacctgctccagacttccagccctcgctttttttttttttttttttttttgagacggagtctcattctgtcgtccaggctggagtgcggttgcgctgtctcggttcactgcaaactccgcctcctgggttcaagcgattctcctgcctcaggctccggagtagctgggattacaggcatgcgccaccactcctggctaatttttgtattttagtagcgatggggttccgccatgctggccaggctggtctcaggtgatccgcccgcctcctaaagtgctgggattacaggtgtgggccaccgcgcccgacctacaggcgcctttttatttgcgattttaaggtccttgcaattagcctacgtgttagagtcatttggcgtttggtagtatccatggcagcattttttctttcttaatgctattgtatttcttggatcgggtgtcttcacatcaccggcctgtggcttggatgcggcacatggtgtaattaggagctcccctgtgggcatgcagatacagatatttctccacttaagaaggggtcagggggcgcggtggctcacacctgtaatcccagcactttgggatgctgaggcaggcggatcacctgaggtcaggagttcgagaccagcctgaccaacatagtgaaaccccatctctactaaaagtacaaaaattagctcggcgtggtggcgcttaatcccagctacttaagaggctgaggcaggagaataacttgaacccaagaagcggaggttgcagtgagcagagatcgacaagagcaagactccgtctaaaaaaaaaaaaaaaaaatggggtcaagtcccagtgaacccatcatgaagtcgaaacatcgtaagtgaaaccacggtaagtgatggaccatctgtgtatatataaggttaagagatctgtaacatgcacaccggaaaggcttattacctctttagagatgtatttcttgtatgtagactcatgggggtaggggcagaagggttatctgctaggggcctcaaactccagccgctggaatttgcgcaggaaagcagggtacaattcccccaaagcgatcattctttctgaaagccgtccccgcagcaacagacaaatagcctccaaaaacccaaagctgccagaacctcactgaagcgttggtagggtctgcagtaaggtacaaaataccatggcatgaagatgtataaacgtgtccataatagggtggatgtgtgttagaagcatgagcacagatatacacatacaggctatccacacgtccatcgtcagcccagactccgcttacattgctgctggaacggaggcagtgtcgcccacagtgcagcatgttctccctggaaggctggtggactttgcgcagtatggtgtttacacaggtacacggtggtgggcgcagggtccgtcctcattatatttgctgaccaatcagttatataaccagcttcatacatctggtaagtcttgtccacaaacaggaacctcaaaaactcaagtgagggcaatgaggagaggaggttgcaaaatttgataaaatatgctaaatacagcaagtcagtagaaggctaaggagcaagctgcagttgcttgcagcaactatcagcagaaaactattaatagtcaatccaatgattctatctgaatcttggtaggtcggtggagcaaagtaattggtgttgctgccccagtgcagaatggacaagggtgaaccttgggttggaggctggactatataatgtaaggatccattacacttctatggggctcttccttccgtccttcatggtaccctcctgaacaattccgtgctaaggccatcaggtgtgtcaagcaaagtgggcgtttgtgtagtatgttccacagtggcccaagcagggtgctggactggagcaggttgaggagggtggcagcacagtggggctgcccagcacaatgtcagacacaaatgggtgctggtgcagcccggcccagggtcacagcccaagcaatttgaagatgtggcacatcccggtattggagtggcccagtgtgtggtgtccagggagggcagggtgctggtggagatgacagattagttacatacagggggatgaccaggtaactgaatgtattaaggataattggagccagagttgaaactctcagagataggagttacaaataaggaaagggagaatgagcccactagtgttgaactggaattggacttagcagtgtggatccatgattttcagtatgtatacacagatagataaagaagtacaaggcgggtggatcacgaggtcaggagattgagaccaccgtggctaacacggtgaaaccccgtctttactaaaaatacaaaaaattagctgggtgtggtggcacacgcctgtagtcccagctactcggaaggctgaggcaggataatcatttgaacccgggaggcagaggttgcagtgagccaagattgcatcattgcactccagcctggcgacacagcgagatcccctatcaaaaaaaaaaaaaaaaaaaaaaaaaaaaaagaagtacatgtggaggtaaacatgtgtatacatgcatacatcccctgacttggtctgtagggggcctgggaacagtgacaccccaacagtacatcttgcacccagatcttggtttctaattcccattctctagtaaaaggaaccaatgttgcttggagaaatggctgtttctggggttaaggcagagaaagtacaagatgagcctaggacatcttgttctgccagcaagtaagggaatgctccaagaatgatggggatgtttcaaaacgatgcagaagccagctccaagaccatgctcccactggccaaatttggaacaacttgagcattaaaagaaatgatgatttgttctgttttgtttttgtttttgagacggagtctcgctctgttgcccaggctggagtgcagtggcactatcttggctcactgcaagctccgcctcctgggttcacaccattctcctgcctcagcctcccgagtagctgggactacaggcacccgccaccacgcccagctaattttttgtatttttagtagagacggggtttcaccgtgttagccaggatggtctcgatctcctgaccttgtgatcctcctgcctcggcctcccaaagtgctgggattacaggcatgagccaccgcgcctggcctgaaatgatgatagtaacatttcgacctgttaaataaaatgggaagccacacttcataccaataaaagtagatactgaataaattaaaagtttgatgagaaacaggatatttacacagtttcaaagtactctcccacaaaatacatattattaattaccattattacatacatgtgatacaggttcattctgcccgcatgccataaatccatcactgtgacaggttttgcaaaagagaaaagatttattcgcaaggcagcccagtgaggaggcaggagaacagctctcaaatcttcctccccaaagataagtcttagggatatttaccggtgagagaagcagggtggtgtaaggtatgggcaaaggtgattggcagtgggggaaaatgaggcagtcggtgaccactgcaagcatagtcagggttcgtggcacttcacagggcacatgttcaaaaaatgacagccttagcgtgatctgagggtgtcgcttggggcctctgatgtcaaaaggccacttcttttgtttgcacaagcctacttgaaagctcacggtctcaactggtttgaactaggcaggagctgccccaagttcctgaaaaacaatttgaacgatcatgacagtagtgacatacatgttatctgtaaggaagccggcaaggttaagttacagcgctcagtggcgcggccttcagcttcacagaaaaaaaataacaaaagcaagtgacccaaagcaagcagggcaggctaaattgggcagacctaatcagatgaaccccatggtctcatatgtaatattacattataactataaagaatgtaattaatgtaaatattcagtacaagaaagtcatcagtgcggggaacactggaattgcgtgccaccagaggacagagtggagccagcgcggtatcacttctgtgctgttcccatcgaaggtcagtaaccggaaccccttcgccaggacgcgggtcctggccaacccaaatcgaggggcattctgcagatcagctggtctgccatcttcaaacgattcatgaaaatcaaagacagctttgaggaacggctccagactggcagagaccaaagaggtcatagatgaacaggagatccccaactggatcctttggctgtaaaggacaatattggcacaacgggtgaagcttgaatggggtctgaggattaggtggtagtaacttcacaggcggggatttgggagaaatgcaatgtcacgtggaaaactgactctcaaatagttcaagaaggaagttctttggactatacttgcaacttttctgtaggcttaatactgtttcacaattttaaaatgtaaaataatagtaccaggtagtagttttttattaagacagattgtgctttttgaaagcattggtggaaagatttctcaaaatcatgcgcgaaagagtttataatgaaattgtgtaatatttgtttcaaaagaaagtgtgggccctgagaagcattttctgtagtttacacagtatttctgccaatttgggatactttcagtgtccctggaattctcatcatctgaatttcttactctttttccctttaaaaaaaaataaaataaagaagtatgaggcaaaaggccacacctacctacctcactttaaaattctgtctaaaaacctggtcacagaggaagatgttggctaactttaatgcgataatctagttcccctcaaaatggaaagctatttagaaaaaagctatttgcccaacgtgaggaacaatttatagaaactgacaagaatttttgtcctggggaaaggacagggtttgttgcatgggataaggggaagtgatgtggccgggcatgatggctcacgcctgtaatcccagcactttgggaggccgaggcaggtggatcgtgaggtcaagagatcgagaccatcctggccaacatagtgaaacctcgtctctactaaaaatacaaaaattagctagatatggtggtgtgtgcacctgtagaaccagctactcgggaggctgaggcaggagaatcgcttgaacctgggaggcggaggttgcagtgaaccgagatcgctccactgctctccagtctggcgacagagcaagagtctgtctcaaaaaaaaaaaagcaagtgattttttttaaaaaaagaaaacagaaccgatgtctgaaaaagtagtactcctttacaaaacacattctctacaaacgcgtggtttcatgtgacctctgctcagtccctttccacaactttctcctgcctattttcttctctgcattttgtcaggatgctttttattgtaaattttactgtgttttgcatgcttccaaatataaaaaataatttttaagatgaattaaacattgaacctccctctcagtattgttttgggaacatgcattctcctgaggagagggagctgttgagtggaagcagtcaaacagaactccacatttcattttcctggcatgggtttcagggtgcaactcaaacagaatgtgacttggcatctgtcacctttcccaggcactccctatcctctggcaatttgttgccttaatggagaaccattcaaaattaaatattttatattagaaaagaaatgttaaacataaagaaaagttatacaaatattataacaacctagtgagccttccttcactaattttctctctcatacacacacatctatgtgtatgtgtgagtacacagtatatatgtgtatatatttacacaatcactttttttcttttgctggactacttgagagtaaattgaagagattgacattcttcagctctaaataattcaatatgaacctcataggatcaaagatgttttcatacataaccccagtgcaattattaccaaattcagataatttcatatccgtacaattttcccatatataatatattcaatatttaaattttgacagttatcccagtattgtttatacagcaactgttttcctttgtttcttatttttatagatacatagtaattgtacatatttatgtgttacatgtgatactttgatacatgcatacaatgtgcaatgatcaaatcagggtaatgaaggtattcatcacctcaaacgtttattatttctttgtactgggaacattccaaatcttctcttctagctattttgaaatatacaataaattattgttaactattatcactgtacagtactatcattccctctatctaactatctttgtacccataaccaacacttttcatccttccctccctcctattgcttgccagcctctggtagtcatcattctactctccacctccctgaaatcaacgtttttagctcccacataggagtgagaaggtgggatatgtatctttctgtgcctagcttatttcacttaacgtaatgtcctctggtttcatccatgttgctacaaccgacgggatttcattctttttatgactaaatagtattccactgtgtatatgtagtacatttttttttttttgagacaaagtctcgctctgtcacccaggctggagtgcagtagcgtgatcttggctcactgcaagctccgcctcccgggttcacgccattctcctgcctcagcctcccgagtagctgggactacaggcacccgccaccacgcccggctaattttttgtatttttagtagagacaggttttcaccgtgttagccaggatggtctcgatctcctgacctcatgattcgcctgcctcggcctcccaaagtgctgggattacaggcgtgagccaccgcgcccggccttatctagcatgttttttatccattcatctgttgatggacacttggattgattccatatcttggctattgtgactagtcctgcagtaaacatgggagtgcagatatctcttcaatatactgatttgctttcttttgggtgtatacccagcagtgggattgctagatcatatggtagttctagtttcaattttttgagaaacctccatactgttttccacaatggttgtacgaattttcatttccaccaacagtgtacgagggtttccttttctccacatcctccccaaaatttgttattttctgtcttttgataatagccattttaactgaggtgagatgatacctattaatgtggtttcagttgcatttctctgatgcttagtgatgttgagcatttacttatatacctgatggccattagtatgtcttcttttgagaaaatgaaaatctttttcagattatttgccctatttttgttttgttttgtttttgagatggagtcttgctctgtcacccaggctggagtgcagtgggacgtctcggctcactgcaacctctgcctcctggttcacgccattctcctgcctcagcctcccgagtagctgcaactacaggcgaccaccaccacacccggctaattttttgtatttttagtagagatggggtttcaccgtgttagctaggatggtatcgatctcctgacctcgtgatccgcccgcctcagcctcccagagtgctgggattacatgcctgagccaccacacccggcccatttgcccatttttaatcagattgtttccttactattgagttatttgaggttcttatacagtttatatataggtaactaatcctttgtcagatgcaagttcgcaaatattttcccattctgtaggttgtcccttccctgttatttcctttgctgtaaagaagcgtagacgattcttttttttcccctcccccttcccagcttagaagatttctgacaagtgtagtgaaatcaacaactgctctgcaagaatcagattccagggcaggcacagtggcccatgcccataatcccggcactttgggaggccaaggcgggtggagcacctgaggtcaggagttcaagatcaacctggccaacatggtgaaatcccatctctactaaaaatacaaaaaaaaaaaaaattagctgggcacagtggtgaatgcctgtaatcctagccacttgggaagctgaggcaagagaatcgcttgaacccaggaggcagaggttgcagtaagctgagattgtactgtgtctggaattggttccttctggtgggttcctggtctcgctgacttcaagaatgaagctgggaccctcgcagtgagtgttgcagttcttaaagctggtgtgtctggcgtttgttccttcagatgttcacaggtacctggagtttcttccttctggtgggttcgtggtctcactgacttcaggagtaaagtcgcagaccttcgcagtgagtgttacagctcttaaaggtggcacgttgggagttgtttgttcctccggggggttcgtggtattgctgacttgaggagtgaagctgcagaccttcacgctgagtgttacagctcataaaggtagtacagacccaaaaaatgagcaacagcaagatttactgcaaagagcaaaagaacaaagcctccacagcatgtaagagtaccccagcgggttgcccccgctggcgcaggtggccagcttttattcccttatttggccccacccacatcctgctgattggtccattttacagagcgctgattggtccatttttacagagtgctgattggtgcctttacaaacctttagctaacacagagtgctgattggtgtgtttttacagagtgctgattggtgtgtttacaaacctttagctagacacagagcactgattggtgcatttacaatcctttagctagacagaaaagttctccaggtccccacctgattagctagacacagagcgccgattggtgcgtttttacagagtgctgattggtgtgtttacaaacctttagctagtcacagagcgctgattggtgcatttacaatcctttttagctagacagaaaagttctccaagtccccacccgacccagaagcccagctggctttgcctctcagtaccactgctctccagcctgggcgacagagcaagactccgtctcaaaaaaaaaaaaatagcactaaaagaaacttattaaaaaagaaaaacattgtcaggtcaggctaaaggttaaagaggaaaaaaaatcacagggtagggtcaaagagtggcgataacagagaagagagtcatgagacttgaaattaaataatagaaattactcaatattaactgcagagagaaaatagactgaaaaaaattagcagagcctcagtaacctgtgggactgtgatgaaagatttaacatcatgtcatcaaagtccccccaaaaaagagaaaaaagcatgaagctgaaaaatattcaaagatatgatggctcaagattttccaaaaattgcaaaagacatagcctaaaccgaataaactcctaacaagtctgaggcaatctatatcaatatatatatcataatcaaacgcctgaaaactaaaggcaaagaaaaaagtattaaaaacagcaagacagaaattctaccatatttataagggaaaagcaattttttttttttttgagatggagtctcgctcttttgtcaggctggagtgcagtggtgcaatctcggctcactgccacctctgcctcccgagttcaagcgattctcctccctcagcctccagagtagctgggactacaggcgcgcaccaccatgcccagctaatttttgtatttttagtagagacagggtttcactgcgttggccaggatggtctcaatctcttgatctcatgatccgcccacctcggcctcccaaagtgctgggattacaggcgtgagccaccgcgccctgccaggaaaagcaatttttaaatgacggcatatttctcctccgaaatcacagagaccagaaggaagtgacacagtattttccaagtgctgaaagaaaagcagtgtcaatcgagaattctattatccagtgaaaacagccttcaaaaatggaagggatatcagggcaatctcagatgaagaactactaagaatttgtcaccagcagacctaccattaaaaaaatggctaaaggaaattcttgaaatagaaaggaaatgataagtcttagaacatcagggaggaacacagaacaacagaaagagtaaaaatatagataaatacactagacatttcttctgctgagttttcgagagtatctttgtccaagcaaaaattttaacattgtctaacatggttattgaagtatgtagaagaatcattaagataattgtaagtgagagagggtaaaatgacttaaaagaattgtaaggtttctatgcttcagtcaaactggtaaaatgtcaacactagtagactgagatatcaatataatgtaatatgtagagcagctattaaataatttacacaaagagatacacactaaatcactagacatatcaaaatggaattctaaaaaggtgctagtaacccaaaggaaagtacgaaaaagaaaacagagaaaccaagaacagaggaaacaaagataacaaaaaaattctatggaagacctaagacttaatatacaggtaattacattaaatataaacagtctaaatacactaataaaaagatagattagtgagtgaaacaagccaggcacacaaagtcaaatatcacctgttttcactcataagtgggtgctaaaaaatgtgtacacatgaagacagagattggggtgacagacaatgaagacttggaagggtgaaggagtatgagggggtcatatgataggtaattcctaattgggtacaatgcgcattatttgggtaatggataccctaaaagccctgacttgaccactatgtaatctatgcatataacaaaactgcatacggccgggctcagtggctcacgcctgtaatcccagcactttgggaggctgaggtgtgtagatcacttgaggtccagagttcaagaccaggtgggccaacatggtgaaaccccatctctactaaaaatacaaaaattagctgggcatcgtggcaggtggctgtaatcccagctactcaggaggctgaggcaggagaatcacttgaacccaggaggtgaaggttgtagtgagctgagattgctccactgcactccagcctgggtgacagagtgagactccatctctaaataaataaatcagcaggtatttataaacataggccagataatgtcacttctctgctcacaaccttccactggtaccacatctcacagcaaatggaagccaaaggccttacaatattagcaacagccccagctttcaggccacaaaattcatcttgaaactgtagcctactgagtattcttaacgtaaacatttccttaatataaagcagtatatattcgctgtagaaaaactgaaaaatataaaacatgtaaagggggaaattacttataattccacagtctaaaatagccactacactggtttttttaatatatatatctttttgtaaatctagtttttacaatttaatgatactgaggcaaacaaatttgccacatccataaaaattttgaaatcaaatagaaataaaataataaaaagacagattggcagagtaggtgttttttgtttgtttgtttctgtttgtttttttaaaaaatagaaccaacagcaagcatagtggctcacactggacgctgaggtaggagggagcccaggagttggagaccaacttgggcaaccatagcaatgtagcaggacgagccgcagacaaaactcagacaccgagttaaataaggaaggggtttattcggcggggggcattggcaagactcctgtctcaagagcagagctctccgagtgagcaattcctgtaccttttaagcgctcacaactctacgggggtgcgcgtgagagggtcttgatcgattgagcaagcagggggtacgtgactgggggctgcatgcaccggtaattagatgggaacaaaacaggatagggatttccacactgcttttctatacaatgtctgtaatctatagataatataaccgattaggtcaggggtcgatctttaactaccaggcccagggtgtgatgccgggctgtctgcttgtggatttcatttctgccttttagtttttactttttctttctttggaggcagaaattgggcataagacaatatgaggggtggtctcctcccttagcaagacttggtccctacacatttttttttttttttttttttttttttttttgagacggagtctcgctctgtcgcccaggctggagtgcagtggcaccatcccggctcactgcaagctccgcctcctgggttcacgcctttctcctgcctcagcctcccgagtagctgggactacaggcgcccgccaccatgcccggctaattttttgtatttttagtagagacggggtttcactgtgttagccaggatggtctcgatctcctgacctcgtgatctgcccacctcggcctcccaaagtgctgggattacaggcttgagccaccgtgcccggcctgcattttttaagtaaataatttttcctctttaggcctcatctggtttattttttattttttgtaagatttaaactcagacttaaacatttaattttatccatgtgtgcatatgaacctcttccattacttccaacaggtcagcattgtgtaaactacacttcagttataaaccttgttttgagcagccaggttgcagcccatacaatgttcccagtgaggacttcctcctacctatttccctccatctctgagcgagcgtggacttgctgcacgggggggtgcacacttcatgctctatgtgctgagggacttccctccggatccgaccttgttaatatcccagttgtgagtgagagcttctgaagctccacaggttaactggaaattaaattgcagcgttagttgtctcctcagaactcactggtttcatgcctcactcagaagtaactgcacaattccagggcgtccacaggaacctacaggttttgcctacccctgcccgcgactggctgatctccaaaccctctccctggcttcccgctggctgctcctgccactcccgtcgtgttccgccccaagcccctttgctttgctctctgctcctccaggcggttcctcccacacagacgtgctgggctccacaggggcgccttttgcctcaggtggatcagaacatgtgttcgtgtgactctttttttttgttttgttttgtttttgtttttgtttttgttttttgagacaagtctcgctctgtcgcccaggctagagtgcagtggcgcgatctccgctcactgcaagctccgcctcccgggttcacgccattctcctgcctcagcctcccgagtagctgggactacaggcgcccgccaccacgcccggctaattttttgtattttttagtagagacggggtttcaccgtgttagcccggattgtctcgatctcctgacctcgtgatctgcccgcctcggcctcccaaagtgctgggattacaggggtgagccaccgcacctggccaatttttttttttaatttagccaggtgtggtggcagacacctgtagccccagctacttaggaaaatgaggcaggaggattgcttgaggccaggagctcaaggcttcagtgatctgattgtgccactgcactccaggc

SEQ ID NO: 1282 - DNA, 41206 bp, Homo sapiens
ttttgtggaaaataactttattcatgactgtgtttatcacactatcttatggagaagagatgatcaataaatatttgctgaataaatgaatagcagttacaaaacacttgattcatatggaattaatgttggttctcaaagtgaaaaattacaaacagcactgatattcagccagtatacaagtctggtcacagcagttgtataatactgaaataccccctgccactgacctttggcccccagatgcctcccactgccactgctctccccactgggaacccctgaagttcccacaggctcataactaaagggctaatgtcttgcacagcagcgagcacccaggaccgagcagccacatggccgggtctgctggtgaaagcatccattctgactgatcaggacctgaggggcctcatggttacatattttgataatatccctaattataaataaggctcagttatatagtttgaaaacaatgcttctcctcattgcaaaatctcttagaagactccgtagatccaggaacggaaatggaaaatgacagcgtgtcaatctctgaaggttttgggcatttccattagcactccatcttcatgtaaaccagaagatatgcagtttcctgcctagagagaagagaagacacatcagcacagcggcatgaaaccttcatcagaaaacaatgcttcattaatccgtgacaggacaagcgtcagcaaacttccaggcggctggattaggccttcatctatccatcaccttggagaggaacaaaataggtggcctgggaagataagcactatgtttctattagttaatatctaaagcggaggttaacaagctatggacacacaagccaaacccagccctcttggggttttttaaatctactttcaacttttattttagattcagcgggcacatgtgcaggtttgtcacgtggatatgagcatactccccaacagttggcctttcacccctcccctccctccccatccagcagttcccagttgttgccatctttaagtcaatgagtccccatgtttagctcccatttataagagagaacatgcattatgttttgtttggtttttgctggtttttttttttttttttttaatggagtcttgccctgtagcccaggctagagtgcagtggcacaatcttggctcactgcaacctccgcctcccaggttcaaacgattctccctcctcagcctcccgagtggctgggactacaggcgcccgccaccacgcccggctaactttttgtatttttagtagagacagggtttcaccgtgttagccaggatggtctcaatctcctgacctcatgatctgcccacctcagtctcccaaagtgcagggattacaggcgtgagccaccgtgcccagccttttgtttattttttgacgagaccgttcttgctctgtcaccaggctggagtgcactggcacaataatagctcaccacagcctcgtgctcctgggctcaactgaccctcctgcctcagttttagcttcctgagtagctaggactatggatgtgtaccaccatgcctagctataataatttttatttttttgtagagatggagtcttgctttgttgcccaggctggtcttgaactcctggcttgaagtgatcctcctgcctcggcctcccaaattgccgggattaaaggtgggagatcgcacccagtctccaaccctctttttgcaagtaaatgtaactggaccccagccatgctcatctgcccatgtactgtctacggctgcttttgctctacagggcagagttaagtggttgcaacagacaccgcacagaccacaaagtctgaagtactttctctccagccctttacagagaaagtctgccaacctctgatctcaataacagggaaatcaatgacaaccacaaagtgacaaagattgggtgtctaagatggatgttcagaataaacaagagagaaagatgaaaagtagaaggaggatttcaaacgcaagcttcacctaatccattatttttcaaatgaccaggcctatctctgtagctgaaaatcacctcaaataggatctctgatatacagtctccaaaagctcagctaagaaacttacaaagtctctctgccttaacttcatccaccttttttctctccagcttctcctcggtagttaatgattataaaaatatttattggctcatgcctgtaatcccagcactttgagaggccgaggtgggcggatcacgaggtcaggagatcgagaccatcctggctaacacggtgaaaccccatctctactaaaaatacaaaaaattagccaggcgtggtggcgggcgcctgtaatcccagctactcaggaggctgaggcaggagaatggcatgaacccacgaggcagagcttgcaatgagctgagatcctgctactgcactccagcctgggtgacagagcaagactccatctcaaaacaaacaaacaaacaaacaaaaaaacagtgtgatggccaggcgcagtgttcatgcctataatccaagcactttggcaggctgaaatggatggatggcttgagcccagcagtttgagacaagcctggcaacatagcgagacctcatctctacaaacatttttttaaaatatgccaagcatggtgtacagactgtatgcctgtagtcccagctattcaggaggctgaggtgggaggatcacctgtgcccaggagttcaaggctgcagtgagctatgatcacaccacagtgctccagcctgggcaacaaagcaagactccatctctaaaaataaaattaaattaaaaaaaagatcttcgctgtaaaagaggtatgctcaaatgcaataaaagcatataagaaggccaggtgtggtggctcatgcctgtaatcccagcactttgggaggctgaggcaggtggatcatgaggtcaagagactgagaccatcctggccaacatggtgaaacaccgtctctactaaaaatacaaaaaacaatcagctgggcgtggtggcacacacctgtagtcccagctactcaggaggctgaggcaggagaatcgcttgaacctgggaggaggagccaagtgtagtagccaagattgtgccactacactccagcccggcaacagagcgagactccgtcaaaaaaaaaaaaagaaaagaaaagaaaagaaaaccatacaagaagcccctacgaatctgggtgaatcagcaaaggcttcacaggataggaaaaggccatgagtatgaaaacatgagtggggagttggcctagatggtaaacgaggagaggacaatacggccaggaagtgcatgtgcacagcagacgggagatggagggcacggctgattggcagctacctgtactttaatattcctggagtgtgacgtgtgaggcaaacatggggtggtggggtgagtgctggagatgaggcggacagtgagccatcagcatgttagtaacaggggaatccatgggcgtttcatgcagctccaaggaccctatgtgagctcatcagactccaattacccaaatctgtttcttaccagtggtagttaggatttccgtaggtacactggatgtcttcccaggacacctggaagccagaaacaaatggggtcaagcagccagctgacacaagcacccacagaggacaggatgctataatgtgcccctcatcctccagacaagcccacccctagcaactcccaagagcctggagcaacagcagcaggatgtcttgtgcaatgaagtatgtttagtgcccttgtccctgtgtttaaacttggtcatgcttatcccagaggcctaacttacatatttctaacactcgttgctctctagacatttcccacaaagcaggaagctgcagagcatgagcctagagcaccaaaaacttagaagtgaagtgaattgaacccttacagaggtgcaaaccacatggggacttcagaccgaaaaaggcttgaaccctcatcaaaggccccacacccagacagcaggatcacagtgtgtcttgatctcagagacccacgcagccctgagcccagcatttgctagaggtggccaatccagggcaggaggcaattgtggatgatgtttcttaccaagcaaatattggagtcattgaagcagaaccattttccatccacagcattccggatgtagacacagtaatgaccggagtctgccattcccacgtgcgcaatcacagcaaaaagctcatactgccctccagactggaaagagacaggcacgagacagttcacccaccaccacaaacacgactgcctcacacatttatacctgcccacactaggcccgactctgggactttagaatattagaaaacagtcccgacccacagccagtgggcaccctccaggaggggctttcccgagtgtggatcctgaactgcgaaggctcagcagcttggcagggcagagcacgcaagagatggaaggcaggtcatgagagaggcccccaaagccaaggcaagattagaactttcccctgggaggggtggggatcatcagaacacagttctgtttctccacaagcccaggaatgaccctaacctgagccaccgtacccagccaaaaaagtcttttgtagggggaggggagacagagggcaagggcggcagacgcaaagctgagtcacccacagtggaggctgaaattatccctatttccatttgcagactttgtgcagaactttacaaaatgcagggcaatatctgtatctaaatattagtttacaagaaataaaagggttacaggaacatgttaaaagatatcaaccagccagtgctggcatatgaaaaaaatattcaaccaaatcaactgcaaggaaaagaaaaggagcggaaatctaaaaggaactcaagaaaagaaagaaacttaaccaaatgcaagtgtaggcgttgtttggatctagagtcaaacaaaccacatagattacacaacagtcaggaagtctgaacgttgaccagatatttgatgctattaaggaattgcaagatggagatgattatcttttgagtgcttattctttagggatacataatgaagtgtttataaatgaaatagtatgatgtctgggatttgcttcaaaaaaatccagtacagggttgggtgaaacaagagggtgggttataggaaaagcaagacctgccatgagttttggtaactgttacagccaaggattcactgtctaactcttccttcactacacactttggtatctatttgtaatgttccataacaaagtcttttttgttgttgttgcaaagatggagtcttgctttgttgtccagctgggctcgactcctggactccagcaatcctcttggcctcccaaagagctgagattacaggcgtgacccactgcatccagtcaaaaaagtcttttttaagtgaaaaacaattttaaatacacttcattgggcagaatctgcaggtagaaataaaaagaactagaaggaaagaaaaagagaatcctatgaaatgtatacggcctaagtaggtaaagaaatcatgttataataggagctattgtaacatattatcaggtcttaattttctaaatgtcatggttctagagcataaatagccaaacagaccaataaaacagaagagacactccaaaaatagacccgtacatacaggaatacaaaatttgttatgtagcatttcaaatctatggaaaaaaagatatttgtgtcttttttttttagtttttcttgttttgtttttagagacggggtcttgcgctgttgcccaggctggagtacaatgatagatcatagctcactgcagcctcaaactcctgggctcaagtgatcctccaactcagcctcccaagtagctgggactaaaggtttgtgctaccacacccagctaatttttttttttttttttgagagacgggggtctcattatgttgctgaagctggtctcgaactcctgggctcaagcaatcctcctgcctcagccttttgaggtgtgggatcacaggcatgagccacatcacctggccttgtgtctctttttttctcagaatctcttgataagttattatctcaggacaagtgaattaaactttactctgattaaatgtggtccagtcaactggctactttatgattatcctcaaagtgggcacaggccatctgaggaagaaagtttggttggtactatgaacccacaatgacatgtttgcctatgcatttctatgtattccacattatttccaaagaagcctactgaattctggattctgtccctcagtgctgtgaggcatatgaacacaaatccaatatttagaaagaagaaaggcttttgaggctggggacagtctctgaggaacaggtggctcctagcagactgggggtgaaggaagggaaaacagaaaggacatggcatctggggagaggcaggatggcaaggaggtcgggatcatcccacctgctcctcagcatcacaagactctcgcttcattggaaggatctggctgaaatccaagctctgggggaagtacagggagtggcagatctttctcgtctgtgaattcctgatggagaatcgcatgaggtggattgtcagggtctggggcaaatgggtcagcttcaagacctgaaaaatcaaaatcactctggagatgaagtctacttggaatgagagagtcagagaaatgtcagggctagcaacgcgttcttcccaaaaagaggggagcggggcgacatcacggagttcaaggctcctgttcgccgaatctgctgagctcctctgagaataatgcaaaacttggctattctaccaccatgtggccccccacaagaggcacaagggcacagggctctgcacaggtaccaggacccagggagccaccgcgtctgctccagggagctggtctcgcctggagggaaacgccctgccggctgctctcaggcgccctcctgcagtccctctcagtgatgcgacatgagaagccacatccacggctccagatatcagaaccacagcgtcccagatactagccagacccagattccctttctcacccaccatggggtgtcctcggggcctctgatgattctatcaggaaatccacggggggcaaccccagactagtgaaggacagatgacccctgaacagcacgggtttggactgtatgggtccgcttatacacaaattgttgtaaataaatacagtctgccctcccccataggcacgagttccacatctgcaaccaaatgctcatcaaaaataaagtatcccagatgcacaaccgcatagatgagggactgacttttcctatacgtgggttccacagggccgactgggtgtgacttgagtgtgtgtggattttggtaaaagcaggggtcctggaacaaatcccccatatgcaccgagggacagctgagtctgatttagggaatgagtacctgtttcccacgggtcttcttcccacagttctcacagaagcacttgcttttgcttgataactccctgggctggaagaagcagtgcagggcgtcctcctgtcccacccaagagaacagggaaaaagcagcgttggtatttcccacctagaatactatattcatctgttctcacactgctgtgagacaatagctgagactgggtaatttataagaaaagaagtttgattggcccatggttctgcaggccaaccggaagcatggcagcatctgcttctagggaggccgcaggaagctcccaatcatggcggaaggccaagcaggagcaggtgtcttacctgggaggagcaggtgtcttacctgggaggagcaggtgcaagagaccaagtggggagctggagtgcaggggcgcgatctcagttcaccgcaatctccgcctcccgggttcaagcgattctcctgcctcagcctcctaagtagctgggactacaggctgcgccaccacgcccagctaatttttttatgtttttagtagagacagggttttaccatgttggccaggctggtctcaaactcctgacctcaggtgatccacccacctcagcctcccaaagtgctgggattatgggcgtgagttaccacacccagcctggctccacacttttaaacaaccagatctcatgagagctcactgtcacaaagacagcaccacgggggatggtgccaaaccattcacgagaaaccctcccccatgatccaatgtccttccaccaggctttacctccaacactggggattacaattgaacaggagatttttgggcagggacacagtcccaaactgtatcagttacagcctccccacactttgcagctgagggtttcagcttttcttctggttctcctcatatcccccttaatgcctggcctggtgtggtccacttggcaggatctcaaagggcacctactgactggaggaacaaaacaggagggggctcctattaagggagcagtatgagggaagtggaggtaggagggaaaaacatttttgccaaacaaaggagaaattggccagtgccatgaaaatgaaataagtgactttccagaagccagagatagatcaaagaggcaagggggaattggccacactgtgctgtgtggtgtaatggtttgagggtttgtcctccccaaaacccaggttgaaactgaatccccagtgtggctgtatggaaaggtggggactttgagagataattggggagggcaaggtggctcatgcctgtaatcccagggaggctgaggcaggtggatcatgaagtcaggagtttcagaccagcctggccaacatggtgaaaccccatctctactaaaaatacagaaattagctgggcatggtggtgggcacctgtaatcccagctacttgggaggctgaggcaggagaatcacttaacaccagaggcggaggttgcagtgagctgagattgtgccactgcacttcagtctgggcaacagaggaagactctgtctccaaaaaaaaggggggggggaggttattgcatcatgagggcacagccctcataaatgaattaatccactcatggattaatgggttaatcggttatcctgggagtgggactggtggcttcatacgaagaggaagagagatttgagctggcacattagcatgctcagccccctcgccatgtgatgccctgcactgcctcgcctcaggactctgagagttcccaccagcaagcaggccctcaccaggtgcagcccctcaaccttgacttcccagcctccagaactgtaagaaataaattacctagtctcagatattgagttataacaacagaaaatggactaacacatacaggggcagcaaataccaagagaatccccttaccagtgtcttcaggggctttgagtccacatcaaaaagagaaagtgggagggtgagcatgctgctgtttctgctactctccatggcacagtcaacgcaaatcaaggagtccttcacccggatcgtatacagggcctgcagtctctccacctgcaagagggagagcggagaggtgagatgggaacaccaccataagccaggtcaggccaactgccagaaggtggagccaagagacagaagctcctcacaaaggtgcaaaataataccagtaacaatattatgaaactgtgataagtgttttatgtggattaactcttttttcttttttttttttttttttttgagacagagtctcgctctgtcacccaggctggagtgcagtggcgcgatctcggctcactgcaagctccgcttcccgggttcacgccattctcccgcctcagcctcccgagtagctgggactacaggctcccgccaccacgcccagctaattttttggtatttttagtagagacagggtttcactgtgttagccaggatggtctcgatctcctgacctcgtgatccgcctgcctcagcctcccaaagtgctgggattacaggggattaactcttttattcctctacacactacgggaacaacagctgaatgagtgaaatgagcagcatcttaagcttccgagtgctctggttctaggttcttaccaagtgcacatcagtgatctggtccttaatcaggttccagagtttgaggtacagttgggcagcatcatgttggacaaacactggccacagagaaaaggaacagccaattagtgaggtcttcagagtcgcttctcatgccctggtacttagacacacatgaacactcatcactttgtctcttcctagccctccaccccactgcaaggctaagttggcacgacagaagaagtgatcaataaatgaacagtaagtttggtattgatttttgagaacgcctcttaaaacttaagctccagtgccagatgtagtggctcatgcctataatcttaacacttcgggaggccaaggtgggaggatcgcttgaactcaggagtttgagaccagcctgggcaacatagcaagactccgtctcgataaaaaatttaaaaaagtacttgagagtagcggtgcacgcctgtagtcagagctacttgggaggctgaagcaggaggatcactggagcccaggatgttgaggctacagtgagctgtgatgtcaccactgcactcagcctggggaatgagatgtccacagggactttgaaaagcactgatacattcctgaggatctagaaggccaggcgcatgcccaagtaagacctgagagggctcagatccctcccctctggctgacaacaaggccacatgcaagaaagcaatgaaggcgaatacagaatcatgaactgcccagaaacgataaaacagcaacaacaacaaaccctgctgtggggatctctgatgtccagtgttgccaccttacattatctaaaatgttcattttccaacaaaagagacaagacctacaatgaaacagaaaagcatggccacccaggaaaacagcaatcgtagaacctttcactgagaagccctagatgttggcgttactaaacaaagactttagccgttataatatgttcaaagaactaaagaaaaccatgtcaaaagatgtaaaagaaagtgtgaaaatgctgcctcaccaaataaaaagtatcaataaagaaaaaactataaaagaagaaccaagcagaaatcttgagttgaggagaaccataactgaaatgaaaaatgtactagaggaggtcaatagcagattagagctggcaaaagaaagaatccataaacctggagctaggttgattgaggttctccagactgaggacggaaggaaagctgaacacagtacctatgcagcgaaaagctgaggagctgctcactgcgtgtagagctcaactaactctgatacaaaaaaaaatgtgatacaaaaggttttatacacaaatgtgaatttattctgaagccagcctggggcaaggagcaagacacatcctgccttttaatgtgccatttctcctttggaggagagaggggcattttcataaggtgtgttgtgggggtggggggagtgagcaatggcggttttctaccgggcagttatcaagttcccagcagctgagttggcgcctttccgggcagaaaagtggccgagtgggcatgctttctccatgccttcctagtgggtgaaagacaaacccctagagggtggaagtttcgaagccaccccctggcagggagagttccctggtgggtatgctttgggctgcaaatctactgccaagtctcaggaaagatcagctggaagaacttgcccgttctcaatcaaacctccatcagcctacctccatttacagattcttccttttgcccagcagggaatgtctggagaggggtaggcgaaaggtgatatttgcatttctaaagggctaacaggaaacaggaaacacggccgcggtgaggggtgagggatgggaagaggagaagtgaaaagaaagtaataagaaaactaatataactatctcttagaaaatgggagtactcagttacacccagatgggttcactagtgaacgatgggttctaccaaacatttatgggaaaaattataccaattccctacaacctcttccagaggacaaaagcagagagaacacttcctaactcattctctgaggccagcattatcctaacaccaaaaccagacagacattgtaagaaaaaaacctaaaaaccagtatctcccgtgaacataaatgcaaaattcctcaacaaaatattagtgaatcaaattcaactatgtataaaaagaatcacagagggtgacacaagcgagatggtagagaaggaggctcctggtgctccccttctcccatggacacacggtaaaactctcatctacacacagatcaactccctctgaaagaaacccagaaaccagctgagagaggcctgcacagggggcaatggggagaacacccacatcgcaaccggttggaaaagctgagacacactcgcaccacaagccccaccccagacacagtaccttactgtgaggaaggaatccctactcccagctttctcctggagaggggagggtttggaccacacataggcagccccagcttttgcagttcccactcaagggcttggctgctgggtcacctagctctgggagcagacatgggtcagcagttatgaatcctctgcgaccacagagggcaaagaggcagttttaaacgggcacgtgagcacttccagcagctgtgctcagcacagagcaaacaggcagaaatgccaggcttccagtttctccctggaaggatatgtctgcgggctctcctagctgttgcccgagggatgggcttctattaataactggcctgcacctggagccaatgaggcaggtaaacaatagatttccaggagtctggacaggcctgtgggcaagtcccatgccttctcccaccccctgctgtatggtaaaatcaggtctctaacttcacacattgagtacacatttacccctctcaaatgaaggtctagctcctcgaccaccgagctttgggagctgacaaggctctgtatttgtaagtcccacaggggcacagagaccaaagaacatccccccaggcccagtgcagcgtgaacaggcaaaaaggcccggctcctactttctccctagaaggagtttgtctgcacagtgcagctgctgccctggggtttctatgcatctgggagctgacagagcaggaaaccagtgctcctctgagaccctgaacaggcaggtgagcacctccacagctgctcccactggtttgctcaacagatagcgtcaagcttccaactaacctgtccgtctctaagcagagagcagccagcattcgctaggcccctgggggtgacaaagagtaaaacaatgcgtgaaggagtgtgcagtttcaatatgagtgcaggcacttgccacagatcctctgtccagcgttttgcagagcaagtggcggattaactcatgctcccagcttttccctgaggatagaataaactggaacacacatttaatgccccaacgtctccacctgcacctcaaggggctggtttctatctcccctgtctagggcactgacaggacttgacacattctaatctcctgagggccgctaacaacatagatgacagtctggacaacacaaagggtcaacaggtgctccgagtgtccggcagggctaattggtaagttcgtctcttatacaaggcccgtgggacaagactgggagaggtatttttctttttttcttttttctttttttttttctttttttctgagacagagtcttgctctgtggcccaggctggagtgcagtggcgcaatctcggctcactgcaagctccgcctcccgggttcacgccattctccttcctcagcctcccgagtagctgggactacaggcgcccgccaccacgcccagctaattttttgtatttttagtagagacagggtttcaccgtgttagccaggatggtctccatcgcctgacctcatgatctgcccacctcggcctcccaaagtgctgggattacaggcgtgagccaccgcgcccagcctgggagaggtatttttcttaactaaagtacagaaaataacagagaatcaagaacaatgaagaaacagagaaatatgttccaagcaaaagaacaagataaatctccagaaaatgcccctggtgaaatgaagataagtgacttaccttacagacaattcagaataatgatcatgaagatgcttaccatgtctaggacagcaatgcatgaacaaagtaagaatttcagcaaagagacagaaaaaagttcaaaagaaataacagagctgaagaatacaataactgcaataagagctcaaaagagaagctcaacagactaaatcaagcagaagaaaggattagcaaactagaagataggtcactggaaatcattcagaggagcaaaaatgaaaaagaatgaaaaagagtgaagatatcttaagagagttaggggacatcaagccgaccaaaataggcattatcagagtcccagaaggaggagagtgagaagagatggaaagcttatccaaagaaataacagtcacgagttgcagatcaacatttcagtcaatggcagaccacatgagcacagtggccatagcatgcagcctagctgtgtagtaggctgtcccatctaaatttgtgtaagtgcactccatgatgtccacacaatgacaaattcaccttctgatgcattttcagaacgtatccctgttggtaagcaacgcatacctataatgactgaaaacttcccaacccagggaaggaaatacaaatccacatccaggaagcccaaaggacaccaataagactgatctaaagcaacccacatcaagacacatcataatcaatttcaaaagttaaagacaaagaattctgaaagcagcaagagaaaagcaatgtattatacacaagggaaaacccgtaagtgtaggatttcttctgggggtgatgaaaatgttatgaaattagattgtgatgatggaggcacaactctgtgaatacactacaaacctttgaattgtatgtttttaaatggatgaattttacagtatgtgatgcacaacccaatatagctatctaaaaaaaaaaaaaaaaacctaacctatttgtgaattattttgtagaacatgttttctcttttttattcctttattctgttttcctgcagttccctgactgtggtggaataagcttggaggagatgccttcacttactctactgagaggcagagaaaggttaggtatggaagtaaaatgtccataaataatatcaattctgcacctccaaagatgtgtgcctcttacacaaatgtctctataatctgaggggtccaggctacctaacttgcttcttgttgcttcactgcccgttagttcctctcttcactctctaagcttcccatcccctttggatcagcagccaggagcccagtgggagggtatcttacagggcacgttgcacttctgcaggcagtaggccagctccaggggccgcactgctttctgccggctgtcctgcatcttctccagcagcagaagcatctggaaagggacgcttctcctctgctcgtcagctcccctgggcaccgtgatcctgccacacaagaacagccagaaacctccttacatgtagttctcaaagctaggtgcacactggaatcacctgggagaaattttaaatcttcatatccaggccactcccatacaaattaaaccagaattctgggtccggggggcggggcgcgggcagttatcagaatttttcagttcctcagattatttcaatgtgtggtcaaggttgagaagcaccatgtgagtgaatctgctctacaggggaccctctagagagggggatcagcatgactgctgccttggcccctctgcaccctgcccagcaatcgtgctagagcagacggcagatgcacgaggtcctggctccacatctcgggcaagcagcaaaatgtccagcctaaagctctccagactgcagaggcacatgctgggttaggtcctgggaagaaaggcaacatgaaaggctgtccgtgtggtttggcaatgattcatttaatcacaggcatttttcggatgggaaaaaggagagagcacagggcagaaaaggagtgatagagagagacagagggagagagtgcattgtgtgagtgttggtggaaggaggggtgtgtactccccactgacttactccttctccgactttggtctagtcccaactctgtcttttaaccaagtcagtggctgtcaatcctggccgcatttaaaatcacccaaagagggctttaaaaaagtaccaatacctggccgggcgcagtggctcatgcctgtaatcccagaactttgggaagctgaggtgggcaaatcacctgaggtcaggaaattgagaccagcctggccaacatggtgaaaactcatatctactaaacatacaaaaattagccaggtgtggtggcgggcgcctgtaatcccagctacttgagaggctgaggcaggagaatcccttgaacccgggaggcggaggttccagtgagccgagattgcaccgtcgcactccagcctggggacagagtgaggcttcatctcaaaaaaaaaaaaaaaaaaaaagtaccaatacttgggtcgcaccccagaccaacctaagaagttttagaaataatgtgtaggccagaatatgcagaagccaatctttcctctgccagcttttgagagaagatctcaaaaagtccaagtcactgtgaataactgaatatattaaaaatgaaataatacaggccaggtgcagtggcttacgcctataattccagcactttgggaagctgaggtgggtggatcacgaggtcaggagatcgagaccttcctggctaacacggtgaaaccccgtctctactaaaaatacaaaaaaaattagccaggcatggtggcgggctagtcccagctactcgggagactgaagcaggagaatcgcttgaacccgggaggcagaacttgcagtgagccaagatcatgccactgcactccagcctgggcaacagagcaagactccatctcaaaaaaaggaaaaagaaataatacaaatgctcatcagcctgaagaacagtcttacctcttcaatatcctggtgaagtccacattcattacgaacacctgaatcaaggagttaaggcagcaggtctgtccaatgttgtgtaaaccaaccaggcctataaggggaagagaaaaaaatgctgagggcaaggcctagggtaaagaagttgacaaggctgggcatggtggctcatgcctgtaattccagtactttgggaggccgaggtgggcggatcacctgaggtcgggagttcgagaccagcctggccaacatggtaaaaccatgtctctacaaaaaaaatccaaaaatcagccgggtgcggtggctcacgcctgtaatcccagtactttgggaggccgaggcgggcagatcacgaggtcaggagatcgagaccatcctggctaacacggtgaaaccccgtctctactaaaaatgcaaaaaaaattagccgggcgtggtggtgggcgcctgtagtcccagctactcaggaggctgaggcaggagaatggtgtgaacccaggaggcggagcttgcagtgagccaagatcacgccactgcactccagcctgggcaacagagcgagactccatctcaaaaaaaaaaaaaaaaaaaaatccaaaaatcagccaggtgtcatgacaggtgcctgtagtcccagctccttgggaggctgaggcaggagaattgcttgaacccaggaggcagaggttgcagtgagccaagatcatgccactgcactccagcctgggcaacaagagtggaattctgtctcaaaaaaaaaaaaaaagttgacaaaaatctaatgtttttcttaaagctactaaggacatgaagtcctgtaaagtctctcaagtacgaagtgttcattcagcttgcaaacaaatcggagagaagatatcaaacatgaatctttaaaaagctctatcacaagggccaagcacagtggctcacacctgtaatcccagcactttgggaggccgaggcgggaagaccacctgaggtcaggagttcaataccagcctggcctacatggtaaaacctcatatttactaaaaatacaaaaattagccgggtgtggtggtgcatgcctgtaatcccagctactcgggaggctgaggaaggagaactgcttgaacctggcaggcagatgttgcagtgagccaagatcgtgccactgcactccagcctaggcgacaaagcaaaactccatctcacacacacacacacaaaaagttcgataacaagaaaagttttaatatagtccattaggaaaagtgagatgtcaccaaaagtatatattactcactgccaaatgagtagtatgagcaattgttgggagagaaaaaaaaacattagagaaagcataactgagaatatggcttcctttcattcaaatcgttctccacggagctaagtccaaatgtgcatctgtggggctcagggataagagggactccccagtatgtctatgttggagtccagcggagaggtctctgcccagttcccactacagggaggcaggaaataaatcagaaggttactttggggaagattcacctaatccagtgtcaccctgagaggctgaaaggcagaaggaacttataagaatacgagaaaaacaaaagataacatttgtctgacccctagcaaccaacctcctcttttccaacccaaccttaggctcagcagaccccacaagggaagtaccactaatctcaggattcttggggaaagggctttggcttacaagataggacagtaagaaagtaacaacctggggtcacaggtgagcacagatttctactcccagactatcaggagcacattgcttccagacagacccatacaaaggtagcagtaaagatgggaactaatgctaagtgcctctagaatcccagcactggcttaaagcagtttccacagatgaccccatttaatcctcccaacaaccctatgtgcttggtactattattacccccatttgtttgtttgtttgtttgagacagagtctcactctgtcacccaggctggagtgcagtggcgtgatctcagctcactgcaacctctgccgcccaggttcaagcaattctcctgcctcagccacctaagtagctgggattacaggcacctgccactgcgcccagctaatttttgtatttttagtagagacggggtttcaccattttggccaggctggtcttaaactcccgacctcatgatccacttgccacggcctcccaaactgctgggattacaggcatgagccaccgcgcccgaccttgtttttgttttttacagatagggtttcactatggcccaggctgtatccccatctaaaagatgcagaaactcaggcacaggaaagcatgagccgtcgaatacaaagctctgcggcttcagagcggagggggtgagccgaacatttacatgcagtcaagaagaggaaaacgggaggggtctaatgaccatgagggtagtcccaggccctgggacgctctctgggctgctctctcttcatgttgctgtcttcttccttcttttcttcaagatctgccggggactgcgaggactcagccaggatggactgacagatttgcctcaggagcccaaacgccttgctcattcgtgatcactccaaaacccccaggccgcagctgcctggcccgcgttcaggacagcacgacttcacttccaggaagcgcttatgtgagccaggcacgatggaatctctgtgaaaatacaatgcgggtaggcaagaattagagaaggaggaatgtgtattcatgtaatccgttctgatgccaaagagcaggtcttagagggagataaatgtttggggagactgactcatagagctctaggctggaaatgacagctaggctacacatcccctaacctgggtcccaggcgtttccattcatcctcagagccgactgccaaatcctaaccgggagcgccctcttgggaaaggacagggaagcgcgcataggactttgctttacaacccaggaccaggcccacttcagtaaaaagccagcactaagcaagaactctcagcccctgatgccaggctggcatacaggggaagcctctcaacccgcccaacacccaaggggacctgcggccctggcagaacagcctcgtgttctggcccgcaacactgccggccagctgcagcagtcagataaaccttagctgcaggcaggctgtagctacctgtcggccttaggcacatcctggtgctgggctggtctcatggcatgaattctgggggtgtgactcaatattgtctcagcctcagtggccataggggtacccgtgtaccctcccccaacccagcacagctgtgtgaagagagacactgtttgcttgggggaagaagaggtaagtggagtacttcgccttggaacccagtgtgtccggaattggtgggtgcttggtctcactgacttcaagaatgaagccgtggaccctcgcagtgagtgttacagttcttaaagggggcatgtccgcagtttattccttctgatgttcggatgtgttcggagtttcttccttctggtgggtttgtggtctcgctagctcaggagtgaagctgcagaccttcgcggtgagtgttacagctcctaatacggcgcatctggagatgtccgttcctcccggtgggttcgtggtgtcgctggcttcaggagcgaagctgcggaccttcacggtgagtgttacagctcttaaggcagcgcgtctggagttgttagtccctcctggttggtttgtggtcttgctggcttcaggagtgaagctacagaccttcgcggtgagtgttacagttcataaaggcagtgtggacccaaagagtgagcagtagcaagacttactgcaaagaatgaaacaacaaagcttccacagcatggaaggaaacctgaccaggttgccactgctggctcgggcagcctgcttttattctcttatctggccccacccacatcctgctgattggtccattttatagacagccaattggtctgttttacagagagctgattggtccgttttgacagggtgctgatgggtgtgtttacaatccctgagctagacacaaaacgtctccacgtccccactagattagctagatacagagtgtggacacaaaggttctccaagtccccaccagagtagctagattcagagggtcgactggtgcattcacaaaccctgagctagacacagggtgctgattggtgtgtttacaaaccttgagctagatacagagtgccgattggtatatttacaatcccttagctagacataaagattctccaagtccccaccagactcaggagcccagctggcttcacccagtggatcccacacctgggccgcaggtggagctgcctgccagtcccgcgccgtgcgcccgcactcctcagcccttgggtggtcggtgggactcggcggcgtggagccgggagcggcgctggtcggggaggcttggtccgcacaggagcccatggctgcggggtggggaggctcaggcatggcgggctacaggtcccgagccctgccctgccaggaggcagctaaggcccggcgagaaatcgagcacagcagctgctggcccaagtgctaagccccttactgcctggggcttgcaggccggccggctggccgctccgagtgcgggcccgccgagcccacgcccactcggaactcgcgctggcccacaagcaccgcgtgcagccccagttcccgcccctgcctctccctccacacctccccgcaagctaagggagcccactccagcctcggccagcccaggaaggggctcccacagtgcagcggtgggctgaagggctcctcaagcgtggccagagtgggcgccaaggccgaggaggcaccgagagcgagcgagggctgtgatggctgccagcacgctgtcacctgtcaccaggactaggctcactacagtaaaacccagtactgggcagagcctcatcaccctgatactagaccagtacccacaggcagatctcaccccaccctagtgccagatgagaacccacagccccagtaacagggactggcgatctggcccacatcactacctgacaactacagtggccctgggccctgaataacttcagcagcagcaagcacgccatcacagctgtgggtcttgggcgtgccccagtgctgtgccagtctcggcagctatggccttcaggcataacccagggctgtgtcagcctcagtggccaaagaattccaaccacagtgatgctgggcttagagcaccccccagcactacaacagctgaagcagtcatgggcttagggtcctgaccaatcagcctctccctaatctcctatgggtttcctgatgaaagacgagcccaaacaaagccaggcaatgaagactggcttaggtacctatgtcaatgcacagacattgacacacagccataaggatcaaggtcaatcagagaaacatgacatcaccaaatgaacaaattaaggtgccagtgactaaccctaaagatatagagatgaggcctggcatggtggctcaggcctgtaatcccagcagtttgggaggctgaggtgggaggatcacttgagcccaggagttcaagactagcccgggcaacatactgagaccccatctctaaaaaaaaatttagatggtcatagtggtgcacgcctgtggccccaaatactgagaagggtgaaggaggaggatcacttgaggccaggagtttgaggctgcactgaactatgattgtgccactacactccagcctgggcaacaaatgagaccttgtatctaaataaataaataagatgaaataaaataataataatgggtaacatcgaagcactatttcttataaaaggtgaaagccttttatatgtactgtcttatttatccttacacagccatgtgaattaattactgttatatttccatttgacagatgagaaaactgagatacaaagaagtaagtgcctttcccactggcaagtgatgggccagatgtagacaagctggacggggtttaagtccagctaacatgctgctcagagtgaggaataaactcaaccaaatcattggtgggaatgtaaattagtagagccattatggaaaacagtatggagattccttaaaaacctaaaaatagatataccacatgatctagtaatgccactgctgaatatatatccaaaggaaagggaatcagtatgttgaagagatatttgcactctcatgtttactgcagcactgctcataatacccgagatacggaatcaacctaagtgtctatcaaaagaggaatggataaagaacatgtggactatatacacaaaatgggatgttattcagccattacaagagaatgaaatcctgtaattcccatcaacatggatgagcctggagtacattacgttaagtggaataacctaggcacagaaagataaataccacatgttcacactcatatgtgaaagctcaaaaagcttatctcctagaaatagagaatagaaagccaggcatggcagttcacacctgcaatcccagcactttggttggctgaggcaagaggatagcttgaagccaggagttcaagaccagtctaggcaacatagcatgttgcctaaataaaataaaaaatattttattttctaaaaataaaaataaaattagcctagcatggtggcatgtacttgtggtcccagctacttgggagactgaggcaggagaatcagttgagcccaggaatttgaggccacagtgagttatgatcgtgccacggcactccagcctgggcaacagggcaagaccctgtctccttttttttttttgagatggaatttcactctttttacccaggctggagtgcagtggtacaatctcagctcactgcaacctctgcctcccgagttcaagcacttcccctgccttagtgtcccaaatagttggaactacaggcatgtgccaccacgcatggctaatttttgtatttttagtagagacggggtttcaccatgttggccaggctggtcttgaactcctgacctcaggtgatccacccatctcggcctcccaaagtgctgggattacaggcatgagccaccgcgcccagcctggaatatattcttaaattcatgttggatggctcagataacaacaacctctttttcttagtaaatattgactttcaatagttataaacagttgttcttcttacaaggcccagcctaggaggactcaactgaaatgatgacagcagacaattccatcagcaagaaagaggattttgagctcatcattgagggaaagctgatgaaagagagcagagaggttccaggctgcattttccaagatgttgtcctcttctccgccaagacctcccagatacttcagtaggatatagcagtaaaacctcatggagcagatcatttgagcaggctcggtcccaaagggaaacaaaatacagcagcctttcagggtagatcacactggggagacagggaggcggggcagcaaggaaaggaaagtgaagcttaaaaggtctaaggaggatggggagggcaaggcgagcagagagaccgcagctgaagttagcaggggcaataagcatccaccagagaaaacagcctgggcggattccaaggaaggggattttcaaactcaactgctgactcaaaaaaagacccccaggccaggcgcggggtctttgtttgagactctgtctcaaacaaaacaaaacaaaaatcccaaatactaaactaacttagctcccaccctacctgaatttttttttttttttttggttcacgttctctcatgatcttcccgaaatgttatccttaagcttcggggagaggtgagcaacggaaggaactggcccaggcccaccactaaagaagccccaggaccaatcggggtcctcagagaagccccagaagagccaggaacaagctgcagaaaacctggggagggtggggcctccacccaatactccactcacaactggactctctgccaggaaagccaactccaacatttagatgccctaaaaggaacaaaattaacctgccaggaacatgattcaagcagcctcggtgtcttccgacccaccccatcatggcaaccacaattgtagaccgcagtctcgatgacgtgttcacattattttgcatttcttttttctttttttatttttatttttatttttgagacggagtctccctctgtcgcccaggctggagtgcagtggccggatcttggctcactgcaagctccgcctcccaggttcacgccattctcctgcctcagcctcccgagtagttgggactacaggcgcctgccgccacgcccagctaatattttttatttttagtagatgggtttgcaccgtgttagctaggatggtcttgatctcctgacctcgtgatccacctgcctcggcctcccaaattgctgggattacaggcgtgagccaccgcgcccggcctattttgcatttcttgagtaatcgtaatatgcgggttagaacacacggattacaacactttggatgaaaaaccacataatagggaaattttgggactactctctctcaaaaaaaaaaacagctcgtggaaaaactaggacttaccttctttgaaactatgtttatgttaagcattttcccctttgtaagctcatcattgtgtaaaagtgtcagaactgtgcaacacattttttaacagtccaaaagcaagttctttgataaatcaatatgaagccgtgcacctgtgttactctccctcccgttttgttcctgcgaacacatcggtaacctgcattcactctccatccaactctgttcaataccagaaagaaacttcagatgaaatgcttttcagtatttgccttgttttctggaacaactttaaagtacaaattatacctaaataagtacaaattaaagcctctgctttaattttcaaacactttgaacccagattttcaggggtctcaaaatggagttttgtgtttaaaagtctaaatttagctttcttccaaggaaaagggtgtgaagaagagaggttaagactaaaatactctgatttgcagagtttgacaacatccttccaatttctcaatatgaatgcccactgacccagccattccacttctaggaattttccaccgatatatttgtatgaatgtatacataaaattatattcattgccgtatctgtgccagtaaaaactggaaacaacctaaatctccatgcattgtttaaacaatgtacttcccataccatgtatcaggtttttttgtttgtttgtttgagacagtttcgctctgtcgcccaggctggagtgcaacggtgcgatctcggctcaccgcaacctccgctcccgggttcaagcgattctcctgcctcagcctcccgagtagctgggattacaggcatgcgccaccacgccaggctaattttgtatttttagtagagacggggtttctccatgtctgtaactcctgacctcaggtgatcctccctcctcgatctcccaaagtgctgggattacaggcgtgagccaccgtacccggccgaatcagttttttgttttatttttaatgccattaacacatctatatgtcctgccatgaaaagatgtccataatatactcagtggacaaagcaagttcgaaatgattttaaagacttgtacatagaaacatttctgataaggtacaaacaaaaatgatactgagtggaagactgcgagacacatttgtctgcattgtttgaatttttttacaagcttacaacacttctgcaatttctttttttgttttaattaaacacaaagtcatgtcaaaagtccaaataactatattagcttagaaaaaaattcactggcccaaaatatatgcacgtagtaaatacagatcactatcataatttgcagagcacaattattacttaattccttaattatctgactggcataggagcagagttggatgtctgtgctagaaagaaaacttccaaaatgagccccgaacttgcctcaagcgccatgcaagcgtccagcctccgctgctgagttccacgtcgggactgagccggggaccgagctgggaccgaagttccgctccgggcccgccttggtctggccccgcgctcgtggcaccccgcccagctttcgttttccactgaatggaaagcgaaacttacagcggcctccgcgccgggagctgggcgccagcgtgcggggaaaccctgccggcccgagcttcccgcggctgccgttgcagccgcgcacctgctccagacttccagccctcgctttttttttttttttttttttttgagacggagtctcattctgtcgtccaggctggagtgcggttgcgctgtctcggttcactgcaaactccgcctcctgggttcaagcgattctcctgcctcaggctccggagtagctgggattacaggcatgcgccaccactcctggctaatttttgtattttagtagcgatggggttccgccatgctggccaggctggtctcaggtgatccgcccgcctcctaaagtgctgggattacaggtgtgggccaccgcgcccgacctacaggcgcctttttatttgcgattttaaggtccttgcaattagcctacgtgttagagtcatttggcgtttggtagtatccatggcagcattttttctttcttaatgctattgtatttcttggatcgggtgtcttcacatcaccggcctgtggcttggatgcggcacatggtgtaattaggagctcccctgtgggcatgcagatacagatatttctccacttaagaaggggtcagggggcgcggtggctcacacctgtaatcccagcactttgggatgctgaggcaggcggatcacctgaggtcaggagttcgagaccagcctgaccaacatagtgaaaccccatctctactaaaagtacaaaaattagctcggcgtggtggcgcttaatcccagctacttaagaggctgaggcaggagaataacttgaacccaagaagcggaggttgcagtgagcagagatcgacaagagcaagactccgtctaaaaaaaaaaaaaaaaaatggggtcaagtcccagtgaacccatcatgaagtcgaaacatcgtaagtgaaaccacggtaagtgatggaccatctgtgtatatataaggttaagagatctgtaacatgcacaccggaaaggcttattacctctttagagatgtatttcttgtatgtagactcatgggggtaggggcagaagggttatctgctaggggcctcaaactccagccgctggaatttgcgcaggaaagcagggtacaattcccccaaagcgatcattctttctgaaagccgtccccgcagcaacagacaaatagcctccaaaaacccaaagctgccagaacctcactgaagcgttggtagggtctgcagtaaggtacaaaataccatggcatgaagatgtataaacgtgtccataatagggtggatgtgtgttagaagcatgagcacagatatacacatacaggctatccacacgtccatcgtcagcccagactccgcttacattgctgctggaacggaggcagtgtcgcccacagtgcagcatgttctccctggaaggctggtggactttgcgcagtatggtgtttacacaggtacacggtggtgggcgcagggtccgtcctcattatatttgctgaccaatcagttatataaccagcttcatacatctggtaagtcttgtccacaaacaggaacctcaaaaactcaagtgagggcaatgaggagaggaggttgcaaaatttgataaaatatgctaaatacagcaagtcagtagaaggctaaggagcaagctgcagttgcttgcagcaactatcagcagaaaactattaatagtcaatccaatgattctatctgaatcttggtaggtcggtggagcaaagtaattggtgttgctgccccagtgcagaatggacaagggtgaaccttgggttggaggctggactatataatgtaaggatccattacacttctatggggctcttccttccgtccttcatggtaccctcctgaacaattccgtgctaaggccatcaggtgtgtcaagcaaagtgggcgtttgtgtagtatgttccacagtggcccaagcagggtgctggactggagcaggttgaggagggtggcagcacagtggggctgcccagcacaatgtcagacacaaatgggtgctggtgcagcccggcccagggtcacagcccaagcaatttgaagatgtggcacatcccggtattggagtggcccagtgtgtggtgtccagggagggcagggtgctggtggagatgacagattagttacatacagggggatgaccaggtaactgaatgtattaaggataattggagccagagttgaaactctcagagataggagttacaaataaggaaagggagaatgagcccactagtgttgaactggaattggacttagcagtgtggatccatgattttcagtatgtatacacagatagataaagaagtacaaggcgggtggatcacgaggtcaggagattgagaccaccgtggctaacacggtgaaaccccgtctttactaaaaatacaaaaaattagctgggtgtggtggcacacgcctgtagtcccagctactcggaaggctgaggcaggataatcatttgaacccgggaggcagaggttgcagtgagccaagattgcatcattgcactccagcctggcgacacagcgagatcccctatccaaaaaaaaaaaaaaaaaaaaaaaaaaaaagaagtacatgtggaggtaaacatgtgtatacatgcatacatcccctgacttggtctgtagggggcctgggaacagtgacaccccaacagtacatcttgcacccagatcttggtttctaattcccattctctagtaaaaggaaccaatgttgcttggagaaatggctgtttctggggttaaggcagagaaagtacaagatgagcctaggacatcttgttctgccagcaagtaagggaatgctccaagaatgatggggatgtttcaaaacgatgcagaagccagctccaagaccatgctcccactggccaaatttggaacaacttgagcattaaaagaaatgatgatttgttttgttttgtttttgtttttgagacggagtctcgctctgttgcccaggctggagtgcagtggcactatcttggctcactgcaagctccgcctcctgggttcacaccattctcctgcctcagcctcccgagtagctgggactacaggcacccgccaccacgcccagctaattttttgtatttttagtagagacggggtttcaccgtgttagccaggatggtctcgatctcctgaccttgtgatcctcctgcctcggcctcccaaagtgctgggattacaggcatgagccaccgcgcctggcctgaaatgatgatagtaacatttcgacctgttaaataaaatgggaagccacacttcataccaataaaagtagatactgaataaattaaaagtttgatgagaaacaggatatttacacagtttcaaagtactctcccacaaaatacatattattaattaccattattacatacatgtgatacaggttcattctgcccgcatgccataaatccatcactgtgacaggttttgtaaaagagaaaagatttattcgcaaggcagcccagtgaggaggcaggagaacagctctcaaatcttcctccccaaagataagtcttagggatatttaccggtgagagaagcagggtggtgtaaggtatgggcaaaggtgattggcagtgggggaaaatgaggcagtcggtgaccactgcaagcatagtcagggttcgtggcacttcacagggcacatgttcaaaaaatgacagccttagcgtgatctgagggtgtcgcttggggcctctgatgtcaaaaggccacttcttttgtttgcacaagcctacttgaaagctcacggtctcaactggtttgaactaggcaggagctgccccaagttcctgaaaaacaatttgaacgatcatgacagtagtgacatacatgttatctgtaaggaagccggcaaggttaagttacagcgctcagtggcgcggccttcagcttcacagaaaaaaaataacaaaagcaagtgacccaaagcaagcagggcaggctaaattgggcagacctaatcagatgaaccccatggtctcatatgtaatattacattataactataaagaatgtaattaatgtaaatattcggtacaagaaagtcatcagtgcggggaacactggaattgcgtgccaccagaggacagagtggagccagcgcggtatcacttctgtgctgttcccatcgaaggtcagtaaccggaaccccttcgccaggacgcgggtcctggccaacccaaatcgaggggcattctgcagatcagctggtctgccatcttcaaacgattcatgaaaatcaaagacagctttgaggaacggctccagactggcagagaccaaagaggtcatagatgaacaggagatccccaactggatcctttggctgtaaaggacaatattggcacaacgggtgaagcttgaatggggtctgaggattaggtggtagtaacttcacaggcggggatttgggagaaatgcaatgtcacgtggaaaactgactctcaaatagttcaagaaggaagttctttggactatacttgcaacttttctgtaggcttaatactgtttcacaattttaaaatgtaaaataatagtaccaggtagtagttttttattaagacagattgtgctttttgaaagcattggtggaaagatttctcaaaatcatgcgcgaaagagtttataatgaaattgtgtaatatttgtttcaaaagaaagtgtgggccctgagaagcattttctgtagtttacacagtatttctgccaatttgggatactttcagtgtccctggaattctcatcatctgaatttcttactctttttccctttaaaaaaaaataaaataaagaagtatgaggcaaaaggccacacctacctacctcactttaaaattctgtctaaaaacctggtcacagaggaagatgttggctaactttaatgcgataatctagttcccctcaaaatggaaagctatttagaaaaaagctatttgcccaacgtgaggaacaatttatagaaactgacaagaatttttgtcctggggaaaggacagggtttgttgcatgggataaggggaagtgatgtggccgggcatgatggctcacgcctgtaatcccagcactttgggaggccgaggcaggtggatcgtgaggtcaagagatcgagaccatcctggccaacatagtgaaacctcgtctctactaaaaatacaaaaattagctagatatggtggtgtgtgcacctgtagaaccagctactcgggaggctgaggcaggagaatcgcttgaacctgggaggcggaggttgcagtgaaccgagatcgctccactgctctccagtctggcgacagagcaagagtctgtctcaaaaaaaaaaaagcaagtgattttttttaaaaaaagaaaacagaaccgatgtctgaaaaagtagtactcctttacaaaacacattctctacaaacgcgtggtttcatgtgacctctgctcagtccctttccacaactttctcctgcctattttcttctctgcattttgtcaggatgctttttattgtaaattttactgtgttttgcatgcttccaaatataaaaaataatttttaagatgaattaaacattgaacctccctctcagtattgttttgggaacatgcattctcctgaggagagggagctgttgagtggaagcagtcaaacagaactccacatttcattttcctggcatgggtttcagggtgcaactcaaacagaatgtgacttggcatctgtcacctttcccaggcactccctatcctctggcaatttgttgccttaatggagaaccattcaaaattaaatattttatattagaaaagaaatgttaaacataaagaaaagttatacaaatattataacaacctagtgagccttccttcactaattttctctctcatacacacacatctatgtgtatgtgtgagtacacagtatatatgtgtatatatttacacaatcactttttttcttttgctggactacttgagagtaaattgaagagattgacattcttcagctctaaataattcaatatgaacctcataggatcaaagatgttttcatacataaccccagtgcaattattaccaaattcagataatttcatatccgtacaattttcccatatataatatattcaatatttaaattttgacagttatcccagtattgtttatacagcaactgttttcctttgtttcttatttttatagatacatagtaattgtacatatttatgtgttacatgtgatactttgatacatgcatacaatgtgcaatgatcaaatcagggtaatgaaggtattcatcacctcaaacgtttattatttctttgtactgggaacattccaaatcttctcttctagctattttgaaatatacaataaattattgttaactattatcactgtacagtactatcattccctctatctaactatctttgtacccataaccaacacttttcatccttccctccctcctattgcttgccagcctctggtagtcatcattctactctccacctccctgaaatcaacgtttttagctcccacataggagtgagaaggtgggatatgtatctttctgtgcctagcttatttcacttaacgtaatgtcctctggtttcatccatgttgctacaaccgacgggatttcattctttttatgactaaatagtattccactgtgtatatgtagtacatttttttttttttgagacaaagtctcgctctgtcacccaggctggagtgcagtagcgtgatcttggctcactgcaagctccgcctcccgggttcacgccattctcctgcctcagcctcccgagtagctgggactacaggcacccgccaccacgcccggctaattttttgtatttttagtagagacaggttttcaccgtgttagccaggatggtctcgatctcctgacctcatgattcgcctgcctcggcctcccaaagtgctgggattacaggcgtgagccaccgcgcccggccttatctagcatgttttttatccattcatctgttgatggacacttggattgattccatatcttggctattgtgactagtcctgcagtaaacatgggagtgcagatatctcttcaatatactgatttgctttcttttgggtgtatacccagcagtgggattgctagatcatatggtagttctagtttcaattttttgagaaacctccatactgttttccacaatggttgtacgaattttcatttccaccaacagtgtacgagggtttccttttctccacatcctccccaaaatttgttattttctgtcttttgataatagccattttaactgaggtgagatgatacctattaatgtggtttcagttgcatttctctgatgcttagtgatgttgagcatttacttatatacctgatggccattagtatgtcttcttttgagaaaatgaaaatctttttcagattatttgccctatttttgttttgttttgtttttgagatggagtcttgctctgtcacccaggctggagtgcagtgggacgtctcggctcactgcaacctctgcctcctggttcacgccattctcctgcctcagcctcccgagtagctgcaactacaggcgaccaccaccacacccggctaattttttgtatttttagtagagatggggtttcaccgtgttagctaggatggtatcgatctcctgacctcgtgatccgcccgcctcagcctcccagagtgctgggattacatgcctgagccaccacacccggcccatttgcccatttttaatcagattgtttccttactattgagttatttgaggttcttatacagtttatatataggtaactaatcctttgtcagatgcaagttcgcaaatattttcccattctgtaggttgtcccttccctgttatttcctttgctgtaaagaagcgtagacgattcttttttttcccctcccccttcccagcttagaagatttctgacaagtgtagtgaaatcaacaactgctctgcaagaatcagattccagggcaggcacagtggcccatgcccataatcccggcactttgggaggccaaggcgggtggagcacctgaggtcaggagttcaagatcaacctggccaacatggtgaaatcccatctctactaaaaatacaaaaaaaaaaaaaattagctgggcacagtggtgaatgcctgtaatcctagccacttgggaagctgaggcaagagaatcgcttgaacccaggaggcagaggttgcagtaagctgagattgtactgtgtctggaattggttccttctggtgggttcctggtctcgctgacttcaagaatgaagctgggaccctcgcagtgagtgttgcagttcttaaagctggtgtgtctggcgtttgttccttcagatgttcacaggtacctggagtttcttccttctggtgggttcgtggtctcactgacttcaggagtaaagtcgcagaccttcgcagtgagtgttacagctcttaaaggtggcacgttgggagttgtttgttcctccggggggttcgtggtattgctgacttgaggagtgaagctgcagaccttcacgctgagtgttacagctcataaaggtagtacagacccaaaaaatgagcaacagcaagatttactgcaaagagcaaaagaacaaagcctccacagcatgtaagagtaccccagcgggttgcccccgctggcgcaggtggccagcttttattcccttatttggccccacccacatcctgctgattggtccattttacagagcgctgattggtccatttttacagagtgctgattggtgcctttacaaacctttagctaacacagagtgctgattggtgtgtttttacagagtgctgattggtgtgtttacaaacctttagctagacacagagcactgattggtgcatttacaatcctttagctagacagaaaagttctccaggtccccacctgattagctagacacagagcgccgattggtgcgtttttacagagtgctgattggtgtgtttacaaacctttagctagtcacagagcgctgattggtgcatttacaatcctttttagctagacagaaaagttctccaagtccccacccgacccagaagcccagctggctttgcctctcagtaccactgctctccagcctgggcgacagagcaagactccgtctcaaaaaaaaaaaaatagcactaaaagaaacttattaaaaaagaaaaacattgtcaggtcaggctaaaggttaaagaggaaaaaaaatcacagggtagggtcaaagagtggcgataacagagaagagagtcatgagacttgaaattaaataatagaaattactcaatattaactgcagagagaaaatagactgaaaaaaattagcagagcctcagtaacctgtgggactgtgatgaaagatttaacatcatgtcatcaaagtccccccaaaaaagagaaaaaagcatgaagctgaaaaatattcaaagatatgatggctcaagattttccaaaaattgcaaaagacatagcctaaaccgaataaactcctaacaagtctgaggcaatctatatcaatatatatatcataatcaaacgcctgaaaactaaaggcaaagaaaaaagtattaaaaacagcaagacagaaattctaccatatttataagggaaaagcaattttttttttttttgagatggagtctcgctcttttgtcaggctggagtgcagtggtgcaatctcggctcactgccacctctgcctcccgagttcaagcgattctcctccctcagcctccagagtagctgggactacaggcgcgcaccaccatgcccagctaatttttgtatttttagtagagacagggtttcactgcgttggccaggatggtctcaatctcttgatctcatgatccgcccacctcggcctcccaaagtgctgggattacaggcgtgagccaccgcgccctgccaggaaaagcaatttttaaatgacggcatatttctcctccgaaatcacagagaccagaaggaagtgacacagtattttccaagtgctgaaagaaaagcagtgtcaatcgagaattctattatccagtgaaaacagccttcaaaaatggaagggatatcagggcaatctcagatgaagaactactaagaatttgtcaccagcagacctaccattaaaaaaatggctaaaggaaattcttgaaatagaaaggaaatgataagtcttagaacatcagggaggaacacagaacaacagaaagagtaaaaatatagataaatacactagacatttcttctgctgagttttcgagagtatctttgtccaagcaaaaattttaacattgtctaacatggttattgaagtatgtagaagaatcattaagataattgtaagtgagagagggtaaaatgacttaaaagaattgtaaggtttctatgcttcagtcaaactggtaaaatgtcaacactagtagactgagatatcaatataatgtaatatgtagagcagctattaaataatttacacaaagagatacacactaaatcactagacatatcaaaatggaattctaaaaaggtgctagtaaccccaaggaaagtacgaaaaagaaaacagagaaaccaagaacagaggaaacaaagataacaaaaaaattctatggaagacctaagacttaatatacaggtaattacattaaatataaacagtctaaatacactaataaaaagatagattagtgagtgaaacaagccaggcacacaaagtcaaatatcacctgttttcactcataagtgggtgctaaaaaatgtgtacacatgaagacagagattggggtgacagacaatgaagacttggaagggtgaaggagtatgagggggtcatatgataggtaattcctaattgggtacaatgcgcattatttgggtaatggataccctaaaagccctgacttgaccactatgtaatctatgcatataacaaaactgcatacggccgggctcagtggctcacgcctgtaatcccagcactttgggaggctgaggtgtgtagatcacttgaggtccagagttcaagaccaggtgggccaacatggtgaaaccccatctctactaaaaatacaaaaattagctgggcatcgtggcaggtggctgtaatcccagctactcaggaggctgaggcaggagaatcacttgaacccaggaggtgaaggttgtagtgagctgagattgctccactgcactccagcctgggtgacagagtgagactccatctctaaataaataaatcagcaggtatttataaacataggccagataatgtcacttctctgctcacaaccttccactggtaccacatctcacagcaaatggaagccaaaggccttacaatattagcaacagccccagctttcaggccacaaaattcatcttgaaactgtagcctactgagtattcttaacgtaaacatttccttaatataaagcagtatatattcgctgtagaaaaactgaaaaatataaaacatgtaaagggggaaattacttataattccacagtctaaaatagccactacactggtttttttaatatatatatctttttgtaaatctagtttttacaatttaatgatactgaggcaaacaaatttgccacatccataaaaattttgaaatcaaatagaaataaaataataaaaagacagattggcagagtaggtgttttttgtttgtttgtttctgtttgtttttttaaaaaatagaaccaacagcaagcatagtggctcacactggacgctgaggtaggagggagcccaggagttggagaccaacttgggcaaccatagcaatgtagcaggacgagccgcagacaaaactcagacaccgagttaaataaggaaggggtttattcggcggggggcattggcaagactcctgtctcaagagcagagctctccgagtgagcaattcctgtaccttttaagcgctcacaactctacgggggtgcgcgtgagagggtcttgatcgattgagcaagcagggggtacgtgactgggggctgcatgcaccggtaattagatgggaacaaaacaggatagggatttccacactgcttttctatacaatgtctgtaatctatagataatataaccgattaggtcaggggtcgatctttaactaccaggcccagggtgtgatgccgggctgtctgcttgtggatttcatttctgccttttagtttttactttttctttctttggaggcagaaattgggcataagacaatatgaggggtggtctcctcccttagcaagacttggtccctacacattttttttttttttttttttttttttttttttgagacggagtctcgctctgtcgcccaggctggagtgcagtggcaccatcccggctcactgcaagctccgcctcctgggttcacgcctttctcctgcctcagcctcccgagtagctgggactacaggcgcccgccaccatgcccggctaattttttgtatttttagtagagacggggtttcactgtgttagccaggatggtctcgatctcctgacctcgtgatctgcccacctcggcctcccaaagtgctgggattacaggcttgagccaccgtgcccggcctgcattttttaagtaaataatttttcctctttaggcctcatctggtttattttttattttttgtaagatttaaactcagacttaaacatttaattttatccatgtgtgcatatgaacctcttccattacttccaacaggtcagcattgtgtaaactacacttcagttataaaccttgttttgagcagccaggttgcagcccatacaatgttcccagtgaggacttcctcctacctatttccctccatctctgagcgagcgtggacttgctgcacgggggggtgcacacttcatgctctatgtgctgagggacttccctccggatccgaccttgttaatatcccagttgtgagtgagagcttctgaagctccacaggttaactggaaattaaattgcagcgttagttgtctcctcagaactcactggtttcatgcctcactcagaagtaactgcacaattccagggcgtccacaggaacctacaggttttgcctacccctgcccgcgactggctgatctccaaaccctctccctggcttcccgctggctgctcctgccactcccgtcgtgttccgccccaagcccctttgctttgctctctgctcctccaggcggttcctcccacacagacgtgctgggctccacaggggcgccttttgcctcaggtggatcagaacatgtgttcgtgtgactctttttttttgttttgttttgtttttgtttttgtttttgttttttgagacaagtctcgctctgtcgcccaggctagagtgcagtggcgcgatctccgctcactgcaagctccgcctcccgggttcacgccattctcctgcctcagcctcccgagtagctgggactacaggcgcccgccaccacgcccggctaattttttgtattttttagtagagacggggtttcaccgtgttagcccggattgtctcgatctcctgacctcgtgatctgcccgcctcggcctcccaaagtgctgggattacaggggtgagccaccgcacctggccaatttttttttttaatttagccaggtgtggtggcagacacctgtagccccagctacttaggaaaatgaggcaggaggattgcttgaggccaggagctcaaggcttcagtgatctgattgtgccactgcactccaggc

SEQ ID NO: 1283 - DNA, 315 bp, Homo sapiens
ttgtttttgttttttttgttttttttttaacagagtcttgctctgtcgcccaggctggagtgcagtggcgcaatctcggctcactgcaagctccgcctcctgggttcatgccattctcctgcctcagcctcccgagtagctgggactacaggtgcccgccaccacgcctggctaattttttgtttgtattttttagtagagacggggtttcaccatgttagccaggatggtctcaatctcctgaccttgtgatccgcccacctcggcctcccaaagtgctgggattacaggcgtgagccaccgcgcctggcccaa

SEQ ID NO: 1284 - DNA, 299 bp, Homo sapiens
tttttttttagatggagtctcgctctgtcgcccaggctggagtgcagtggcgcgatctcggcgcactgaaagctccgcctcccgggttcgcgccattctcctgcctcggcctccctagtagctgggactacaggcgcccgccaccacgcccggctaaattttttttgtattttttagtagagacggggtttcaccgtgttagccaggatggtctcgatctcctgacctcgtgatccgcccgcctcggcctcccaaagtgctgggattacaggcgtgagccaccgcgcccggccccacat

SEQ ID NO: 1285 - DNA, 211 bp, Homo sapiens
ggttcacgccattctcctgcctcagcctcccgcgtagctgggactacaggcgcccaccacctcgcccagctaattttttgtatttttagtagagatggggtttcaccgtgttagccaggatggtctcgatctcctgacctcgtgatccgcccgcctcggcctcccaaagtgctgggattaccggcgtgagccaccgcgcccggccaaacat

SEQ ID NO: 1286 - DNA, 299 bp, Homo sapiens
gtttttgtttttgagacggagtctcgctctgttgcccaggctggagtgcagtggcactatcttggctcactgcaagctccgcctcctgggttcacaccattctcctgcctcagcctcccgagtagctgggactacaggcacccgccaccacgcccagctaattttttgtatttttagtagagacggggtttcaccgtgttagccaggatggtctcgatctcctgaccttgtgatcctcctgcctcggcctcccaaagtgctgggattacaggcatgagccaccgcgcctggcctgaaat

SEQ ID NO: 1287 - DNA, 174 bp, Homo sapiens
tgggactacaggcgcccgccaccactcccagctaattttttttttgtatttttagtagagacggggtttcactgtgttagccaggatggtctcgatctcctgacctcgtgatccacccgcctcggcctcccaaagtgctgggattacaggcgtgagccaccgcgccccgccaaa

SEQ ID NO: 1288 - DNA, 308 bp, Homo sapiens
ctttcttttttttttttttggagacggagtctcgctctgttgcccaggctggagtgcagtggcgcgatctcagctcactgtaagctccacctcccgggttcatgccattctcctgcctcagcctcccaagtggctgggactacaggcgcctgccaccacgcccggctaattttttttgtattttttagtagagacggggtttcaccgtgttagccaggatggtctcgatctcctgacctcgtgatccacccgcctcggcctcccaaagtgctgggattacaggcgtgagccaccgcacctggcctaaa

SEQ ID NO: 1289 - DNA, 308 bp, Homo sapiens; identical to SEQ ID NO: 1288

SEQ ID NO: 1290 - DNA, 465 bp, Homo sapiens
ttttttctttttttttgtttgagatggagtctcgctgtgtcacccaggctggagtgcagtagtgcaatctcggctcactgcaagctctgcctcccaggttcatgccattctcctgcctcagcctcccgagtagctgggactacaggcacctgccaccacacctggctaattttttgtatttttagtagagacggggtttcaccatgttagccaggatggtctcaatctcctgacctcgtgatccacccacctcagcctcccaaagtgctgggattacaggcgtgagccaccgtgcccggccgaaaatctgtcctctcttacacaatacctcgagtgcactcaatttgaaatccatctgggttcacaaaccgctctagaaggaaggctggttcctgtcacttacccacttggaggtgtggagatatctgggcaccttgttttccttctaacctcaagctgtgctcg

SEQ ID NO: 1291 - DNA, 318 bp, Homo sapiens
caatgtgtactttctttttttttttttttttgagatggagtctcgctctgtcacccaggctggagtgcagtggcacgatctcagctcactgcaagctccgcctcctgggttcacgccattctcctgcctcagcctcctgagtagctgggactacaggcgtcctccaccacgcccggctaattttttgtatttttagtagagacggggtttcaccgtgttagccaagatggtctcgatctcctgacctggtgatccacccgcctcggcctcccaaagtgctgggattacaggtgtgagccaccgcgcctggccaacaat

SEQ ID NO: 1292 - DNA, 22428 bp, Homo sapiens
acatgtttccaactggaatcgtttaatgtgtctacttcttccacgcataattataaaagaataagaatcgacaaaaatattttctttccataatatgtagaggtggtttgtttcttttttttttttttcttttctttttacttttttttttgcccgcccctggcagagctcttggcggggagggaaggggagagggaaatataaccctgaggtggggatggttcagctcccaaccccggaacccctggtgtgtacgggtcaggcagacacatgtggctgggcggctgggctggggaggggacagccgccactgaccagcagagcgtggaagttcggtgcgtttcagtgcctgcctgaaagcttggggacaggagggctgtccacaggtggtgccccccgcgggccctggccgcttctcctgtggggcccgcatgaccctctgctcgggcttgggaagaaatggagcctaccaggtgctgggttgcaaccccgctgcccggtgtggaccccaagtctagatttaggcaccccttgctttctgtcttttattttttatttattttgagacagagtttcgctcttgttgcccaggctggagtgcaatggtgcgatcttggctcaccgcaacctccacctcccgggttcaagcgattctcctgcctcagcctcccgagtagctgggattataggcacgcgccaccacacccggctaattttttgtatttttagtagagacggggtttccccatgttggccaggctggtcttgaactcccaacctcaggtgatccgcccgcctcagcctcccaaagtgctgggattacagacgtgagccaccgcgcccggcctgtcttttaaataattatgaaaaatatccccccaaacaaaacacaaacatcaagttggggaggctggccgggggggacaggcaattgcatgcttgggtgctggggacggtggctggccgggccaggggactgagaggtcacagggagccccaggcggaaggcagcccgctcctctgagtctcttctggcctctccagtgcccatcagcgtgtgacctcctcctcccagaaggcggggagaggaggggctggcccgagaccaccatctctctgtctcggcaaccaagaagcagcggacataaaacccaagagcgtttaaaaaaggataaaaggcgtcggggcggtgaaggcagcggctcctcggggctggccagcgctgggcgggacaaagtgcctcactggggcccgcgggccactcagtccctcccgcctggttccccgcggaggctgcagccacttgtgctgtgatgtggcggctcccggtgggcaggctcagaggtattcctgtagaaagtgcagcaacgtgacttcatagtgctcgcccgactcggggcagcgaatactgtgtctctcgttggggtagatctgcggggagacaggaggcagggctggggggcgtggccggaccacccccgtgtcctaggctcctcccttattctggctcagggcatccgggaaggcgcaggtgctctgaggcccagtgatctgggtttgaatcccacctcggctgttgacttgcagtgtaactctgggcctctctaaaaaatggggtgaatccggacctcacagtctttgggaggatttggtaagacaaagtttacaaaacgccttgcggtgtgcacgcgcttgcacagaggaaagatttaggaagaaaccgtttgcctctttcccccaaaccggctgacgggcgaccaactcatctctgtggaggtggctgaggcttcaagcctcagggacatctggtgccctggtctcgagccatttccactttaccaaaaggcatgtgactagctctgggccttaggacagctgcctgtgaggatttgtgaagcattttctgggtcctcttagcgcccaagggggatcaagccaagaggcaggcagtaacatggaactccccaggctcctgagacctggaccagccaacgccaggcctgggggtggatccacacggggatgcaggtcctgcctctggccacgaaggagggctctcgaggcactgacggacaacccctatagctccccactgccccctaggggttggtaggaccaaggcatgaaaataaccctacgttctccacaaagaaccccggggctggccggcagcaggggcaggtggcccatctacgccacctcctgccagtgagatgggtttctgaatcatcccctcctctccaggctcctggtccccactgttgcccatcaccctgggaatgcaccaagccacccactggtttcccctcctctactcttgccttctttaatccatccctggatgaatcacgagtttgatgacaccgtccccagcctagacctctgcaaggacttgccagtctgacatcaagaccagcttccaggtcctgctgccccaggcacttcaagggcccactccttccccagcccgggcagtggcactccctggggcagactctgctgcccttgacaccagccatatgcacatgttgtgcccatgcctttatgccactctgggtcccagctgcctggttactttttcctcttggctaagagggcagatagagggtctgtctggctccccaatgagcttccagaccaagcccaaggcccggcatgtgacaaatgtgatttgtgtataaagagggcctggggccgccagctgcctggcccagatgttttggggtctttgaaacagaaggagaggtgcactctatctgtcccacacaatgccatgttcccaccccacagcctatctcatctcacgttctacttcctgtggggaggcagtgagacaggaccctgggcccaccctgtgtgctgaatgcttttcttttttctttcttttcttttttttttttcttttgagacggagtctccctctgccgcccaggctggagtgcagtggcacaatctcggttcactggaacctccgcctcccaggttcaagcgattctcctgcctcagcctcccgagtagctgggactacaggcgtgtgccaccacactcggctaatttttgtatttttagtagagacggagctttgccatgttagccaggctggtctcaaactcctggcctcaagtgatccacccgcctcagcctcccaaagtgctggggttacaggcgtgagccaccacgcccggcctgaatgcttttctgaagaccttgtttggccccagcagccttcaaggaggccgagttatcatgaccgtttcaaagacggagaaacgaggtgcaagggtgaatgctgtcccagctacctggcccctgggaaggcagtgggctcgggtctcaggctgggaagagacatctgaagttccattccagccctgcctgatatcactccctgggctgcttgggatgtggggtgtcggtggggggcaccgccaagagatcagctcatcaccgcacaaggtggctctgcctccctcctgctctgcggccccatttccctgctctgttgaaaggcaacaggacgctccccacaggacagagcatgccgaggcgcccaggaagcagaaattgtctgcagtccacaggtaataaaacctggccctcttgcctccaagatacctcctgaatctcccgccggtacaactatggaccacgtcccactgtcccccacaggccatccacaaagcagccagagaaatgtgggtcaaatggcaagccgcccaactctatgctctgctcacaagcccgagtcacctcccaccaccctcagttgaaaatccagccgaagccccgcccccgctgaggccccacccctctatagcagaagctccaccctgcttactgagggccccccctcctctacagcagaagccccaccctcctcaccgctgaggcgctgctcccacaccgagccccaccctctccactaccgaggcccttccccacaccgaggccaaccatttactgcggaagccccacccaccgtaacactgaagccccgtccctctgcagaagtcccaccctcctcgccattgaggccccgcccataaccatgcccaccccttagcgcagaagccccgcccacctagactgagccccacgttgctgccaaggctccacccactcccccactctcctcccgctcggtcccccaagcctggctggctccactcactctagcacccttcactgctgcctcctcagggaatgcttggccccagcgccttaggaaggagcctgctagggccttcagcactcagcggtttcttctacgcaatttctcagtttcaaataaagcccgtctgcggggcaatttcggtaagggttcctccctccattaggcccggagcaggggtgggtgtggcagcccccgatcccgtgcttccagcaccgaaggcaggcggaaccctgagctgtcaagacaggactgatacatcaatggccctgggagctgggagggcggggacacagggctgtggggtggggggctgggagccccagatcccccagggagcccctggtcacagtgggaagccaccccgcctcgtcccaccccccactcccagggatctgtcggctcgcggaggggccgaagcccccaacagccacccacctggagctggtaaggtttccctgctcggatcagttgggagacgaggaagtttgtgtggaaaaagtgcacgttttcgtccaggaagccgtggaggataagcaagcggttgggcctggaaaacagatggggaagggtctgaggccagggattgtccgtggggtaggaggggagcagatcacaaggtcaggagtttgagaccagcctggccaacatggtgaaaccctgtctctactaaaaatatatttaaaaaaaattagccaggcatggtggcaggtgcctgaaatcgcagctacttgggaggctgaggcaggagaactgcttgagcctcagaggcagaggttgcagtgcgctgagatcgcgccactcactccagcctgggcgacagatggagacagcatctcaaaaaaaaaaaaaaaaaaaagatcagctgagtgtagtggtgcgcctgtaagtccagctactgtgcaggctgaggcgggaggatcacttgagcccaggaggtggaggctacagtgagctatgatcataccactgcactccagcctgggtgacagagcaagaccccatctctaaattagaaaaacaaaaacaaaaacccaggccgggtgcagtgcctcatgcctgtaatcccagtactttgggaggccaagctgggtggattgagtccagttgtttgagaccagcctgggcaacatggcaaaacctcatctctacaaaaatatttaaaagttagccaggcgtggtggtgcacacctgtggtcccagctgagcctgaggcaggaggatcacctaaaccctgggagggtgcagtgagctatgattaaaaaaaaaaaaaaaaaatgctgagcatggtggcttacacctgtaatcccagcactttgggaggccaaggcaggtggatcacttgaggccaggagttcaagaccagcctgggcaacatggtgaaaccccatctctattaaagatacaaaaattagctgggtgtggtagtgcatgcctgtaattccagctactgaggaggctgaggcacgagaattgctttaacctgggaggtggaggttgcagtgagctgagattaagccactgcactccagccgggaccacagagtgagactctctcaacaaaacaaaacaaaaacccacctaggtctgctgctgtctgtggtctggagtgtggcatgggctactggtgaggccaacacgcagcctcaccagaatcggctgccctagcccttcctgtccgatacgggagccagtggccacacgtcgccgttgaaattccagtttacattcatccaaattaacggaacttataaacccattgagacagagcacagatcggtggctgccccgggacagggagtgactgctaaggaatgggaacagggtttgacgctggagtgctggaaaggttctggaaccactgcaaatgcaccgagggctgctttaaggtgactgttaggttctgtgaatttcaccacaataaattattattttttgagacagagtctcgctctgttgcccaggctggagtgcagtggtgcgatctcagctcactgcgacctcacccttccaggttcaagcaattctcctgcctcggcctccttgagtagccgggattacaggtgtgtgtcaccacacctggctaatttttatatttttagtagacatggggtttcaccgtgttggctaggctggtcttgaactcctgaagccaccgttcctggcctattattattattattgttttgagacagtttctctctgttgcccaggctagagtgcagtggcacgatgttcgctcactaccaactccacctcctgggttcaagcgattctcctgcctcagccttccaagtagctggcattacaggcatgcaccaccatgcccagcttattttttgtatttttttgtagagacggggtttcaccatgttggccaggctggtctcgaactcctaccttaagcaatcctcctgccttggcctcccaaagtgcccaggcagacttttttttttttttttttttttgaattggagtctggctctgtcgcccagactgtagtgcagtggcgcacgatctcggctcactgcaagctccgcctcccgggttcacgccattctcctgcctcagcctcccatatagctgggactacaggcacccgccaccacacccggctaattttttgtatttttagtagagacggggtttcatcttgttagccaggatggtctcaatctcctgacctcacgatccgcccgcctcagcctcccagagtgctgggattacaggagtgagccaccgcgcccggcccatgcccaggcagatttttaaccccctaggtgactgcatgggattccggggaacattttctggagacgtgccagaaaatgggaacactgttttctctccatcagagaataagacccatgtcaaaagcataaaatgggacatctgagctggtccctggccctgtggacatctatgtcctgaagcacaagacagaggctgtgatggggcctccagcaggatgcaggggagtgggggaggcttgcctgtgaaaagcagtgactcgaattccctcatctttcccagggcagggctgtgagcctccttccccagacaagcatccctgggtgccccttcctgcaaggtgcagtgaggagggagggtgggctggaggggactgtgaggcacatgcaggcagacgccaccacaggagcacagcggggaggctccacatggcctgaggctccctgggcagggccagctggggcaggagggcaccctcatagagacagctggtgccggggtgcaggagaagccccggggaggagcgcagggcagggcagtggccttactcattgggcagcttctccacgtgcagggccacggaacccgcctcatagccgtgctggttgttctcagggacgtccatgtagcgctcagtgtaccctgtgtcgtaggccatccagacggtgaccggggcacccgcgatggccacctgagggacacagcagacagatgggggcagagagagagagagaaacaggcgtcgggtcctacagccagcatcagccgctgtcccggggccgccctggagcccgtgaggagcgctcatgcacatggggccggcaaggaaggggccctcagaccgcgtggcccccgtggacggtgcgtggcatgggggtgggcagggcgccacaggcgggcaggtgcggcccctccccgccgccgcagagggccgggtcccactgcccgtctgcctcctcctcctcctcatcgccgccgccccgcagtgccctgactgccgccggcctggggcccccccgccgctctgcacaccatgccccacctctgcccatccgaggccggggtcccgggctcagcctcccacagagagctgctggcggggttttgtgcagccggatgccatcctgcggtcggcggtggcgggcaatgaggaggggggctcggccccgtggggctgctgcagggagaaacagccacgtggcaaggcccctgccgaggcgcctccccggtaggtgggctccgggtggcgcgggcggtgggcaaacgcggcgtagatggggaagggggcagggaggggcgtggctgaggccggccaggggtgggacccaccttgaacacctggggcttgtggattagccccatgagcgagaggaagcccccgtaggaccagccatggatggcaactcggctcaggtcgatgaagccatacttctcggccacgaactgcaggccctccacctggtcctcgatctccacctggccctgagggatgaagccgggcacctctcagtggcctcctcccggtatgtccctcccctgcagtgacacctctgctcctttcagggcgtctctccctcttggatgaaaagtggctcgctggaagccccctgtccttccaggccctgctaaccctgcctgctatctggggatggctggacagatccagcagccatcttgctctgccacctcccaggtgagtggctctgggagccacgtcccctctgagggcgtcagtttgcccatccctaataaagggacattaacaggaagaggacccattttctagagggcacaaggaagaaaaagacgggtgcccaggcatgtgcaagggcacaaagaatggctggtgccatcgccgttgtcactaccagccacatccccaccaccgccactgccacgatttcaatgctggtgtcccctctgaagtccgtgctgagatcactactgcggccttcaagcgactgatccatggggcccactcatgtgaatgggatgaggggcccttataaaagggcctgatggagggaggccacggcttttccgctccttgcaacccctctgccgtgtaggaagcagcacagggcctctctggagggttgctgaccaggcaacctcgtgggaacagagagcagccctccccgacacagccctgccttggccttggacctcccagcctccagaactgtgagagattttcgttctttataaatccccaggctgtggggttttgttccagcagtgcaaaggggccgagatgatcgccatcaccaccgtcgtcatcaccagtgtcagcacaacttgtctctgtccctgcagggcgcagcccagagctgagcagcaaagcatacatccccttttgttctaaaagggcgcctcattgagcctgcgtcaccccagccagaagtgcccttctgcgggtggtattccagagccgctcccatgccctgcacccacacggcccagggctcccttcccgagacccaaaggacccagagcaacagggaggagttgttaccatttggtttttcagggccccttcgaaccgaagccctcgctgacaggagcccctgccgtcaatcacaaccacggcgtagcccagggaggccagtgtgttgagccgcaagtacttgatgcctttgaaggagttattcaccagctgcacctgtggggaggtgagggccagcagtccagcacgagatgccgggcaggacgggcctggcaggggagatgccggtgggctggggaccgggccgggctggggcctcagagcctaatgaaagcacctgtgccccggaggctctggatggacacctgggagtggcaaggcgggaggggcccatactcgggaccctgctagggagggggaagggccactgtcaggctctttctcagctgggccactgccccagtcctgcctggaacaactactctggcatgatggacattggggtggctccttctcgggtggggccatctgggcactgcggggtgctgagaagccactccaggccaggagaactcgcagtggtgatgaaccacaaagtacccagacatcgccccgtatcctctgtggggacagagctgctctgggtaagatgtgcgcctaagatggtccaactgccaatctgctgcctgcttttgacccctgctccaggaattgggcccagggcccatggccacctccataccaacctggagactaggggacttcctagaggaacaagggagagtcagcaggcggagggggaaggggaggccatccaggaagggcggggagcgtgcaaacgggcacagagaaaggagggtgaggggccccgaggaccctgtgtagtcagggcaggcggggtgggctggggcaccaggcaggtagccggggagcctcctctggttgactgttctacagctggcacttgagtggggatggggagtcctcgggtggatggtggggtgggggcctggggagcaggtgtgcactcacctgggggcctccatatacaaagaggacggtggggtgcttcttccctggctgcaaggcgtggggcttgtagatcatgccgtagagccgcacatccgagcgcgtgtggaaatggaagatctctggaggaacataatccggggggcagcctgcgggagacagggcggctatctggctgcccggggaagccacatccagctgacacccttgttctcctgcccaccccaagccttggagggtggaccaaagcaccccctcttttcctgggcttcccgagagttgataattgaaaaaaacgtttttttttcattaaataagatttgtacagtttttgtagagatggggtcttgtctccctgttgcccaggctggtctcgacttcctggcctcaagcgatcctcccacctcggcctcctgtgtagggtcactgctatttttgcaaagcaacagttgttgtccaattaggatggtgggggtttttctgttttttttctttttcttctttttttttttcaagacaaagtcttgtgatcttggctcactgcaacctccgccttcctgggttcaagcgattatcctgcctcagcctcctgagtagctaggattataggtgcacggcaccacgcccggctaatgtttttgtatttttagtagagacggggtttcaccatgttggccaaacttgtctcgaactgtatttttttttttttttttttgagacggagtctcactctgtcacccaggctgcaatgcagtggcacgatcttggttcacggcaacttgcacctcctgggtttgagcaattctcctgcctcatcttcccaagtagctgggattacaggtgcgcgccaccacatttggctaatttttgtacttttagtagagatggggtttcaccatattggccaggctggtctcgaactcctgtccttaggtgatccacccacctatgtctcccaaagtgctgggattacagacgtgagccaccacacccagccatcgaactcctgaccttgggtgacccgcacaccttggcctcccaatgtgctgggattacaggcgtgaggcactgcacctggcccaaagttttttctttaaataaatgtatgtaggtaaattttggtggggcaatttataggaaggtgagtaaagggtactacaggtctaggggtagcagaagtttactgtggagggccagatagcaaatatattgggctctgggaattgggcgtggcgggacacgctccgtgctgtgtctctgtgtcatctgctgcggtagcgctaatgtggccacagaccacagagggactgcacgtggctggatttggcagcagttggcctgctcctaatgcaggcagtcttcaaacgtggcacagattgggagtttcgggaaacagtgcctcgttccccagggcactgaggttctggtctctgcccccactgctaggctgggtgccctgctgagccccttcccctccctgacccatctcctcatctgaagccagggctccagctcctggcggtgtcggtgcggacaggagagtgaggactgggctctagagggaggcctgggatctgtttctgctcaggggtgagggcatcacaaaatgctttccagcccacggaataccccgcatatgctggaaattcgttgtgtttagaatgttctggaaacccaccaacatggcagagacagggccagggtgggttgtccttgtactgagtgatgcctgggagcccagcagtgtgctgacccgctggttttcatcccacactctgtatatacagtttcgttgataaagaaacacttcatggtgatacgctgatgtgtgtgacggagccagcactggaacccggagtcaccaatgcagggtcctggccaacttccaggttctgggcaaggtgtcaggttgcctcatttcctgaggcccccctgtgactgaccctttgctccttttcctgataaaggcctcggagtgtcggctctgagcaggtgctgctgtgggcggcagcctctgggcacaggacaccataaagggccctctgcatgccgctgtggccaggactgcagggtcctggagaaggtgagtggaaagcctgataaccacggcgggtttcaaaccagtgtgggtggactctgacatcccggccacccctgcatggaccaccactgttcaaaaggttttttttttttgagacggagtctcgctctgtcgcccaggctaaagtacagtggtgcgatctcagctcactgcaacctctgtgtcctgggctcaggccattctcttgcctcagcctcccgagtagtgggactacaggcgcccgccaccatgctcggctaattttttgtatttttagtagagatggtgtttcaccgtgttagccaggatggtctcgatctcctgaccttgtgatccacccgcctcagcctcccaaagtgctgggattacaggcatgagccaccgcgcctggcccaaaatgtttttaatttttaatttttttttagagtcagggtcttgctctgttgcccaggctgaagtgcagtggtacaatcacacttcactgcagcctccgacttctgggcacaaatgatcccccccatctcagtctctggagtagctaggactacatgtgcacactactacacccggctaatttttaacatttttgtagagggagttcttactatgttgctcaggctggtctcaaactcctacgtgcaagcaatcctcctgccttggcctcccaaagcattgggattacaggcagaagccactgtgcccgctgatgaaaatgtttacttgtcacctgcccactaccctgggagctcccagtgacagggtctgtgtctcactggttaccattttggcagggggttggcacggagctgcatccctgccgggttctgtgcagtccggccctttactgcagctcgaacccaggaccgtctcggacggcaggggctgtggcttatgtcctatgacgagttcccagatgcttggaggggcctgggtgctgtgggaggccaggcaggccagctccaggcctctgcctctttccccagcatggggccctcgtcccgttttacagccgggcgggcggaggcctccgtggggcggggcaggggctactcactggctgcctccatcatgctagcccagaagcggggctgcttgtgcagggggtcgtcgtcggggccgctcagcttgtagacgtgcacgcagggcggcgtgctcacgctgctgtagtggctgacgaacatgtcgaagttctgggggtggaatggggtgatgagctccacgggatgccgctgcgccctttccactgggtgccgaccgcagatccagggtagcttccctcccgcccgcccccatccctctgcccctgcctgtcatgaaacctcaaagctccacccgctgctgcaaggggggcaccactgccatcgccccattctgcagagcaggaaactgaggccaggacgagtctgtcccccagccaggggcctatggacagtcaccgaccgctggatctgccgagggctctgccactgcacaggcctgcaagcttgctggctccacagctggcaaactgcagctgactcgtgccctggactaggggtggccctctgcatggccaccgcctgacattctagaatgttctgagaggctaagggccacatcccaccgcacacagagcggcggagccccagctcagcggacgggcactggggggctccaccacttactaccctgggattggtggtgggcaattcactcccttccctgccctacccaggaggcaggggtgggcactgcctgccccaaggcagctatgagaatgcgagaccatgagaatgaccctgagtgctgtgccgggccatgagggactgctctggctgggagctgttggacgggcacagggcggtgccgtgaggctgggcggtcccacctggctcatggagcagctatgggagaagccgggcgtggtgaggcgtacgatctcgccggccgcctcatagctgaccacgtagaggtggtgctccagcggcgtgtccttggtgccctggaagtacaccagcttggtctcctcattgacccagatctgcagggggacaggggatcctcgtgatgcgtcccagatgcccctgggcccacacccctctccacgccccacaggagtgggccccatgttcctcggactggggacgcatgctgtcctcgcccaagtctggctttagggctggagatgaaccatccctgagagatgcgcttatctggccccgtgggctgggagcagcccctggtcgagctgggaactgcgtgtcctcaggcgggacctggggcctgcattccacccccagacagctctttcctagcttgaattgggagggcccaccagagccaggtgggaaggccagggagggcaccgtgcccgaaacagaggctcagggaaacccggcagtccccagcctggtcagccgttcctccgacccaggtgcttgggttcagaagtggcagggccctaccttcctgtgggaagccccagtaggccccgaagtggtgtctcctggaggagtgggagggcagcctgcactgcgtggagcagcggggcccctccttcacctgtgctgggatgctaatggtctcgaaacaactgctgctgcccaggagcgagcaggctttggctgatgcctggaaaggagccgggaggcctcagagccccgagggaggagagggcattgcccctgtgcccagggcctgagaggccggtggaggcagctggagcgtggggtgaccagggaccctaagacgtgaagaaactgaggataagtggtctcctgggacagcggggcacaagcttccagtcgggggagcatcatgccccacaacaaggcagctggacgcatggccccagacggcctgcagaggacacacttcctctttcatgatttctaaaaggcttccaatgttttccttaatttcagggtgaaaggataaagcacgtgaatggcacaacgttcaagatgagacggggaggtgatgaaatgattggcttgtgtgtatggtagacaccgtgctgaggcctgcgaactgctgtaaagcagggtcctcacaggtgtgtgtgcgtgtgtgtatgtgtgagaatgagtatgtgtgtgagtgtatgtgtgtgtatgcgcgtgcgtgtgtgtgtgagtgtatgtgtgtaaaacacacatgcatggagcaggggaaggctgcaaggagaccctggtaccttggagccgtgcctcgccaaaacctcccattcaccgctggtcagagcaatctcttccttaatggggcacttaaattcatctggaaagaaagaaagaagggaggtgaaggggcctgggaggtgatgcaggcgcccaaaggcacccaggccaaattccacccgagcagactcaccatggagccactgaaaccccggcttgctgtgaactcagacgccagcacaggccactgcgtcagacctgccacatgggcaaggaagcctgcggggcctgttcctgccatgtggatggcaggcccagtgtttcccacgataaaccaggagacccgtggctcactcctgaaatcccagcactttgggaggccgaggcaggaggattgcttgaggccaggagtttgagaccagcccgggcaacatagggagaccctgtctctccaaaaaaaaaagaaaaattagccaggcgtggtggcgtgtgcctgtggtccaagctacttgggagattgagctgggaggactgcttgagccaggaggttgaggctgcggtgagctatggttacaccactgccactccagcctgggcgacaacaagaacccgtctcaaaaaaaaaaaacaaaaaacaaaaaacaggaagagaaaccaggaatctggattttcattggaatttcccaattttagaaccctccaaaggccacatgacatctgtgtgtggcacgggaaggggggcggggagtgtgggggaggagccaactgggcccatgacctcttaggacacattaggactttgtaaaaccagactttttttttttttttttttttttgaagacggagtcttgctcttgtcgcccaggctggagtgcaatggcgtgattttggctcactgcaacctccgtctcctgggttcaagtgattctcctgcctcagcctcccgagtaactgggattacaggcacctgccaccatgcccggctggattttgtatttttagtagagacggggtttcaccatgttggtcaggctggtctccaactcctgacctcaggtgatccacctgcctcagcctcccaaattgctgggattacaggcacgagccactgcgcctggccgactttttttgtgggggcgagggggtagagacagggtcttactatgttgcccaggctggtcttaaactcctgggctcaagtgatcctcccacctcggcctcccaaagtgctgggattccaggtgtgagccacatccccggctggaacaagatgctggtgaaagcgctagggctagagaccaaggctctgctggttttatgattgtttttttggggggtaggagggttgacttcatgtttgaattttcaccaggtaaagaatgacagtgcggggtgcatcatggcacacagcagaaacacactgagatggtttgtaactgagggctcactgtcctttcctaaccttttaggtctaaacaagctacggcaaacgtgtctgtcaggagcacgggagggcagatgtggtttccctggcgtagaggtctgggtgtggttacttgtggcatcggggcctggggaggagagcggttcccacccagccccaagacccaggctcctgcccgcgtcccgacgtgttccttctgatgcaatgtcacttggggtcacctcctcgccatgcagctgctgtctaggagatgcatggtgtgtgctgggggctgagcagggtgctgggaaatctggtgtgcccacctcacaggccgggggtccctgggggcactgcagcagcctggagggtctgtgcccctggagagtggcagctgcagctggctccacttgagaccacatttgaaacgtgagcactcgggctggcccattttcccacagggggcaaaatgagcatttacatgaaatcccaatgccagatggcggtggctgagccagccagacagaaagtgaaacaccaatgagccgaagacagctcccctttgagacgcttagccagtaagtctgcactggccgcatcccacccaggaggaccccgatgctggcctgaggcagctgtcaccccgccggtccgcatcatactcagctccgtggcagcctacagcatcacctgtccctggctcattcgcccttcagctcctgcagtcccggatgcctcgctccctggggtctctgtcccctgtgttgggggacgccttggctgctgtgtgggctctgcccccagagggcaccggaccacatctagggacatctgtggttgtcacaactggaggtgctcctggcatggagtgggtggaggccagggatgccacttggtgcacaggatggccccgccccagagaaccacccggccctggcgtccatggtgtccctgctctaactttgaagagcctgggccgggctcccggaccaccccacctctctatccagaagtgacccttgggagctctgtcccatcccgaggctgacactgtcagtgtgcaaggacacctgcaatcccaccaggagtctcggttccctgagctccaggcacgggaactggcccatacagcatctccactaccgggcacctcaacttgaacacatccaaacccgactctggattttttctctcctagaacagtccctctctgagtctgtcttagactggacctgcggagccctccgggcatccatgccgcctccctcctctctgatcccccaccctttccactgcaaacggtgtgggctcagctgtccaagcacatccagaatcagacccaccaggacagctcagccactgccatgacagcaagcctgtcgcctctcccggcccctgggcctgtgtgcaagctgcaaccagaggagtcatctgaaactgaggtgagggtgacgacttcctatttctctcggggtcaaagcccaagtcctcctggagccccagcaggccctgcaccatctgctttttctctccccaccctctcctccctctctccccctcctccctgtgctccagccacaggggcctcctccctattcctccaacatgccaggaacagtcctgcctgccccagggcctttgtacgggctgtggctctgcccagagccgtggtgtggacccctcacctccacagcatgctctccagagacgtcctcatgccctcccgttgtagaaagaaggcccctcaccctcaagcctctcgcccgactgcatttccttccaccacgcacatcacaccagaggcagcacctctaactgtttctggaatactgcctcctccactagaaggtcccaagagcagggattttcctttttctttatttacagtgaacaattccatcacagctacctacagcaggagctggcaaatgtttctacaaagggctagacagtaaatcttggccttgcacaacagtttctgctgggactacccagttctgctgctgcagcacaaaagcgaccacagacagtctctgtaaacaagtggctgtggctcagtgccaataaaactttatttatgaacacaggtggtgggccggatttgacctgtgggccgtaggtggccaacccctggttgtgctaagggcctggcacaggggaggtgctcagtaaatctgctgcctgaataagccaacagttgggtgctctaagccctgccagatcatgcagtcactggggaaggctggcttcctgccgatccctgttccttctcccgcagggtgtgctggctgagtgggggggccgaccaatgaacaaacagcatattgaaccacacgtgactaacgcgatgagtcgacagcattcgtcaggctctgctcaccttccccggggctgaagggctcactccaatcgtagccctgggattttaaaacggcggtgactttgtacaaatggcagaagccggtcttgcattcattggcgcggagaaagcagagctcgtcctctccctctgattgggggaagggatagaagatgtcatgaacctgtccggaaagcagatagaagatgcgtcagaaggtgtgggtggccgggcatggtggctcacaccagtaatcccagtagtttgggaggctggggcaggagacttgcttgagcccaggaatttcagagaccagcctggacaacatagtaagaccccacctctaaaaataaataaataaattagccaggcatggtggtgcaggcttgtggtcctagctactctggaggctgaggtgggaggatcacttaggcccaggaggtcaaggctgcagtgagctatgaccacaccactgcactctagtctgggcaacagagcaaccctgtctctaattaaagaaaaaaatagatgaggggagaggctccaatggctgccagactcaccaacccccctagaccctcttccctgccagccagggatggccaaggcctgagctcacttctccacacaagggcaaacaccacctgccattggcgctcagccttctaggacgtgggggtggggacagtgtgactccagggcccaggcgggcatacagccagcgcttgccccgcttacattgatccagacgttggtgacctcctcgtacaccacatacggctggacattcctggggacagctctggcagaggctagccgctgctcctcattctctgtgctcgggatgaacagggccggggggaggaggacgagctggagccactgctggggccggtccaggaacatggcccaggcgctaagggggaagatgcgggggaagatgagagggaagctgggagcctcagtggcctgcacagagaagctggggacgcagcgtccaaacccgtgtggaatcagggctgggcttcctgcgctggcttcacctgcacttggccaagtaaccctgcagcacccacaggcttccttcctggcacatgcttaggggaggacaggatgggtgacaagatttcatgatccaagtgttccggaaacaatggcctaagtctcacagcggcaagctctaatagtttctcctcttcactgactcttcggcccacagtcgctatcctttatttcgtagtttgctttattttatttatttatttctttatttaattttttgagacagagtttcactcttgtccaggctgaagtatagtggcacaatctcagctcactgcaacctccacatcccaggttcaagcgattctcctgcctcagcctcctgagtagctgggattataggtgcctgccaccatgcccggctaatttttgtatttttagtagagacaaggtttcatcatgttggccaggctagtctcgaactcctgacctcagatgatccgccagccccagcctcccaaagtgctgggtttacagacgtgagccaccgcacctggcctaaatgaacaatttttaaacttgaatttattttaagaggagatgttagtattctacgtggaaaagcagcacctccacacacagaacaacgaaaaccaaaccaaagggaagcatcacagggacataaaatactaactagagtgggtgcctgggctcaggcctgcaatcccagcactttaagaggctgaggtgggcgggtcgcttgagcccagaagttcaagacctgcctgggcctgggcaacatggcaagaccttgtctctacaaaaaaaaaaaaaaaagtccaggcacagtggctcacgcttgtaatcccagcactttgggaagccgaggggggcggatcacaaggtcacgagtttgagactgtcctggccaacatggtgaaaccccatctctactaaaaatacaaaaattggctgggcatggtggcacgtgcctgtactcgggaggctgaggcaggagaattgcttgaacctgggagtcagaggttgcagtgagccaagatcataccactgcactccagcctggtgacagggcaagactccgtctcaaaaaaaaaaattaaaatattagctgggagtggtgactcacacccacagtcctagcaaatgtacatatggcagcagcacataatagaattcattgttaacattccattggaggcattaaccaatgcaattagaaaagtgaacaggctaagaggcataggaatgcaaaagcaagaccctcatatctataaaaaatacaaaacattggccaggcatagtggcgagtacctatagtcccctctactcaggaggctgaggtgggaggattgcttgagcctgggaattcggggctgcagtgagttatgatcgcaccactgcactccagcttgggcgacagagcgagactccatctcaaaaaaaaaaaacaggcagaggctgaatttgcccactggggtttggggcccccgtttagggaggtggtagagttctctcctcgacatgggtgggaggctggggagtgagtacaggggagcacctctactttgtgactcagtttttctgagcctgaggtctggggacacctgaaatcccctctgtaggtctcctccacactctgggtaactggatcagcatgtcctagtggcactaacactgggactcataagtccagtgtttcatcctcagactggctgaggtcaggagggccctttggacactggtctgaggcctgtcctggcggttgcactgcgggaagacgtgagcagatggaaggaatggcacggaaggccaggaggcagcttcggtggctgcccagggcccagggccctgcaggtgaattccttgggttccagccagagacactcactatttgccatcccgggtccacccggccctggcgatgtactccaccttcgggaacagcgagctgaagggctgcaccagctccttctcctgggtcgagacgatct

SEQ ID NO: 1293 - DNA, 210 bp, Homo sapiens
ttcacgccattctcctacctcagcctcccaagtagctgggactacaggcgccctccaccatgcccggataatttttttgtatttttagtagagacggggtttcaccgtgttagccaggatggtctcgatctgctgacctcgtgatccgcccgcctcagcctcacaaagtgctgggattacaggcgtgagccactgcacctggcccaacat

SEQ ID NO: 1294 - DNA, 737 bp, Homo sapiens
aaatctatttttttttttttttttttttttttttttgagacggagtctcgctctgtcgcccaggccggactgcggactgcagtggcacaatctcggctcactgcaagctccacttcccgggttcacgccattctcctgcctcagcctcccgagtagctgggactacaggcgcccgccaccgcgcccggctaattttttgtattttttagtagagacggggtttcaccttgttagccagatggtctcgatctcctgacctcatgatccacccgcctcagcctcccaaagtgctgggattacaggcgtgagccaccgcgcccggccgcaaaatctattttttaaagtgaggtgcccagaatgaagaaaagatggatggggacccttccctccctcaagcaggtcagattgctgggaatgatggtccaggctcctggcccccatcctttcctgtcaaggctacacctaagtgagggtaaaaaatcctggagaaaaccactgcaggaggcagaagcctccccagtgtgtcctacttctgaattctgttattggaccaaaagagccctctgctcttctcctccatatttttcactgttgctctctgggtaatcagaggcagagggaaaaaaaagtaacctttcctgatactcttgcccttgtattttgttcaaaactctctgttaccaaaggaatgattaggaacctcagttggaggttctgaaatcaaaatcattgcgttg

SEQ ID NO: 1295 - DNA, 138 bp, Homo sapiens
tttttttgtatttttagtagagacggggtttcaccgtgttagccaggatggtctcaatctcctgacctcatgatccacctgcctcggcctcccaaagtgctgggattacaggcgtgagccaccgcgcctggcctagaa

SEQ ID NO: 1296 - DNA, 4702 bp, Homo sapiens
tttgtttgtttgagacggagtctcgctcttttgcccaggccggagtgcagtggcgtgatctcggctcactgcaagctccacctcctgggttcacgccattctcctgcctcagcctcccgagtagctgggactacaggcgcccgccaccatgcccagataattttttgtatttttggtagagacggggtttcactgtgttatccaggatggtctggatctcctgacctcgtgatccgcccgccttggcctcccaaagtgctgggattacaggcgtgagccaccgtgcccggcctgttctttaaaaagaatattagattatattttctaaatgtgccaagtatctaagaatatattctttcacctcctgctgataagagttatacatttaaccttaagcaaatctgccaagattctatgtcatttatgctttgatttatgtgagtattaatgtagtttctgtgactattgtatggttatatataccctccacctagtaaaacagttccatattcctggaaatggtcttttacatcccacaaatgtagctggaaaggaataatataaatactaatggtttgagagacaactagtcttgacatgtcttggttgaatagtgttctataagcaacaatatatgaaatactagacacacccattaaaagtagaaaatacccactactgttctaaaattattctgcaagatctcaccaatgcaatgagacataaaacagaaataatgggtgtaattattgaaaattggagataaaatttttattacttgcaaacaaaattctctgtgtcaaaaacctgataaattaaacaatacaattaatatgtttaatagaactaattacatatgagaggcatccaaaatccattttttctatacaaacatggtttgatatacacagtcttgttttatctgtgtattaattggttgatgaaataataaatggaaaaatcaagtatgcattatcaggttaaagaagcaggagagacagagccataaaaacaaagagagaagaatgttgtaaggagggcttaacgaccaggataaatgttgtagagagatcaattaaagtgatggcctagagatcacaggcttcctttggcagagccatgttggtgaagtgaaggaagtggaagccagaccacaatggttgaagaatgaatgtaatgtaagagccaagacatttatttgagtttgatagtaatgaaaaaggacgagaattttcttcttgctgttgtttttgtcatttcatgttcaaaaccctttatctcccatgtgggactgaaaactccaagatgggatctctgtttctgtgaggcctgtagtgcttagtacatccttgaatgtgtgaggctctcattggtataagtttaattcctgactgtggatgaaagctttaaaactttgtgggcaaaatacagaatgaatttcagtgagttcccatgtattaaacaaggtggcgctggctggagacatgctgtccctgtgcccacaggagtagcagtgctgtgctcatcttcctgacccgctcttcacagtcttcaccgcctttcttcaggagtctcccctttggcttttccacagctatgaaacccacgtagtcggacaccctgatgcttctcctgcagggcgtgtgatgaggaggtgagcttggctttggagtgctgggaacctgaggaattgccaaggacccagagcccagccctgaccacccagagagcccaaaacacaatgaacaaattgaatttccacaacagagtcatgcaagaccgccgcagcgtgtgcattttccttcccaatgatgaatctctgaacatcatcataaatgtgagtagatctcaatataattctgatagctggaggatagtgtattttcaggtttgctggaggaaaaaaactggactttaaataattaagacaaaatgattgtattaattgacttctatgcttaatcactaatttcactttttatatttcccttgacttttgggggagaaatagtctttgtctcaaaagtgggcttcagtgacctatgggtctgatgaagcaaccagggataatgagacaaggatatttaatggcaacatgccagcaattattattagttaattgaaagcgtttatgattttggcctggggccaatgctttccccctctgctgggctaacatgtgggtaagggagaggaaaagctttgtttcactttttaaataaaagtattacgtaactttgaaatttgtataaaattaaaagatagtaaaaacaactattctaacagaattcaaaacctgttatgcttcagtggagagattattcaagataagtctgtgggaaattgggagtacatttctactggcaaagttagtgataactatgcacttctgacaaaatgtgaaatggggggtatgggcgtgtcatatcatcatggtgcagatacgtggatgtgtgcttccaaacaatggcaacctaactgactgctggaaccatacaaaatacctgaaactactcagaaagaaggtgaaaattgcatgcaaaaattatttgaaaaatattgagctaacacaacatgaattttgaattataagtgaggtattgtaactcacctacagatgtgttttttgtaatcaatattcatggactcagactacacagtaaaagcttacatagaaatcattctatctaaactttctggatatgaaagtaacttactatgtgttttgctactatatctttatatgaatttaaatcacatttccaagtggcttacagtaatcaaggttaatttgtcacaaggaagatgcaaattaaaaccacattgcaatatcactgcacacccactagtacggtttaaaagaaaaaaaaacaaaatatcaagtattggtgaaaatgtggagcaaacagaactctttttcaataatggcgggtatgtaaagtggcacaaacactttggaaacctgtttggcattataccatactaaacctgaacacatgcattgtttatgacccaggaatgcccctcctgggaaccaacaacaacgcatatatgtgttgcatatgttcaccaaaagacatttacaagaatgttcatagcagcactatttgaaatcgcccccaagtagaagatgcacaaatatttaacagtagttagataaagtgtggtacgtttatgcaatataataccatatagaaacgagagtgagggatctgcaaactaatatgcaactgtacaaatgaatcccacaaatataatgttgggtggcagaagccagatgcaaatgaatacatgctgtagatttcattcttttacattaaaaaagctagtcacacaaagttatgctgttagaagagagtgatttggtcgggcgcaggggtagttacaggaagggagtacacggagatttctggttgttagttatgttcagtgtcaatctaggtgctaaacaggtacaataaagattttagaattcatcaatttgcacacttatgatagatgcactttcctgtatgtatatttcaatacaatcttttaaaaagtaaaatgacaaaaagacactattaacaaaaatgacatattacattaactgttatactaaggaaaatataaaaatgagttctataacaggggctctgcaggtcatgtggtcatgccaaggaccatatgtgctcaagattctcatgacattttggaaggaggttgggctttctttatctttcctttcttctctcccttcccttcccttccctatttttaaacctaggtttggtattttcctggggtgatggtgactttggaaaattgggccggggcggaagtgaaggctgcaacattccccagaacattgagagactaaatggacagggggtgtgccagattgagtgtggagctcagttcctactggcgctcaccaagtctggagtggtgtggacatggtacgtaaacgtcctccccatcacagtgtgcgtgcttgtgccggtgcgtgcagggaacttgggcctcgccccaggaccaccccggcgtgattgtgacctgtcatatttttacttatgcatgcatctttgtcctttaaaggatattgagtcgggattagtgacaatagtacaagaagaaatttcctattgtaactgggtcattttgaaaatactagaaaaattttaggccacttacctttcctgtttgggcgagatttataggaagtgtttcttctgctgaagcctaaggataaaatgagagcaaaatagccttctgaatcctttgatcctgagaaagttaacatgtatttcttgttaaagcttattatattaatgtgcaaaagagcaggtgcccagactggccttggatgctgtgtcaggccttgctgcctctggtcataacattggcactatttatttatttatttatttgagatggagtctcgctctatcgcccaggctggaatgcagtggcacaatctcagctcattgcaagctccgcctccggggttcacaccattctcctgcctcagcctcccgagtagctgggactacaggtgtctgccaccatgcccggctaatttttttgtatttttagtagagatggggtttcaccgtgttagccaggatggtctcaatctcctgacctcgtgatccacccacctcagcctcccaaagtgctgggattacaggcgtgaaccaccgcgactggccaacattggcac

SEQ ID NO: 1297 - DNA, 299 bp, Homo sapiens; identical to SEQ ID NO: 1284

SEQ ID NO: 1298 - DNA, 295 bp, Homo sapiens
tttttgagacggagtcttgctctctgtcacccaggctggagtgcagtggcgcgatctcggctcactgcaagctccgcctcccaggttcacaccattctcctgcctcagactccagagtagctgggactacaggcacccgccaccacgcccggctaattttttttttgtattttttagtagagacggggtttcatcgtgttagccaggatggtctcaatctcctgacctcatgatccgcctgcatcggcctcccaaagtgctgggattacaggcgtgagccaccgcgcccggccca

SEQ ID NO: 1299 - DNA, 4364 bp, Homo sapiens
tttttgtttttgagacggagtctcgctccgtcacccaggctggagtacagtggcacaatctcggcttactgcagcccatgcctcccaggttcaagcaattctcctgcctcagcctcccgagtagctgggattacaggcgcgttaccaccacgcccagctaatttttttatttttagtagagacggggtatcaccatgttggccaggctggtctcaaactcctgacctacagtgatctacctgcctcagcctcccaaagtgctgggattacaagcatgagccactgcgcccggccgagaaagaagtttaatggtaggataattaaagagatgggaggaaacctcaaatctatctccccaaggaatttgaggttagggttttaaagggttttggagtgggccaaagtgtggagattgttgattggttgaagagtgcaggatgaagtcataggacttggagatgaagaaactgtattcttggccaggttgatgcctataatcccaacactttgggagcccaaggcaggaggattgcttgagggaagtagttcaagaccagcctggctaacatagggagaccccatctctacaaaaaattttttaaaattagctgggtgtagtggtatctacctgtagccccagctactaaggaggctgaggctggaggattacttaagcccaggagtttgaggctttagtgagctatgattgtgccacttcactccagcctggctgaggagcaagactctatcttaaaaaaagaaacaagtatattcttgtgctgatttggttcctctctgagggtcttgaaactggttggcttcagcctttccactagaattcaggatcctgagaatatcttaagcagtctttaaacgaaagccttataattccaatgtcagagatcctatctataggaacaatgggaatgcaaatagtcagtatctagtactacatgactttcagcaaaaggaaagtgggccaaagggcagcctgattaatttttaactatatttctgtccagaacctggcatgcaattcatgtcaccccactggggatattttcagagttatatttatcgagtgacttgaccaaaaccaataagcccttaatggcttaactgtgggtataaggggtgtcttcatagagggtgcaaagatacagccctccccccaactgccaagatccagaaccactcccagagatagccaaaagacagagaatcctctgagagctggcaacagttggtaggaccctagatacaagtagggtgcaacccccatttctgtccggccatattattgggggctgccaacctttcagttggctgcctgcaaatacaggcttgataacctgtgtgcccggacaggtagaaagccaagctaagctttcaggacacgagaccaacaggaaagcaaaagctgtctctgagagggaaaggatcaagccagagtcataatccaaaaaaatcaattggtacagatgttttcctcctgctaatcaaagttagaaagtaaggagcaaagaaaagtgtttgccttcctcttctctactaggtgctacagacagatccaggagagttgactttggtaagaattcttacccttagccagcttctgtcagtttccccgggatctcattggcaggttccagagtgagcagggtaccccagagatcctatcctcatcaccagaaactctaggggaggaaagataattttctctctacccttcatagttgttaattgtgatggactcctgtaacaaaagatagattcacaagagaaaaacagtttaatagcttgtacagcagtccccccttatctgaggagagtatgttccaagacccctggtagatgcctgaaatcacggatagtaccagaccctatatatacattttttcctatacatacctatacttcatttataaattagacacagtaggagattaacaacaataaaataggacaattgtaacaatttgctagcattactactcttgtgctttggggccattgttaattaaaacaaagattacttgaacagaagcactgcagtactgcaacagttgatctgataaccaagatggctactaagtgactaatgggtggtatatacagtatggatgtgctgggcaaaggaatgatttgcatcttgggtgggatggagcaggacggcatgagattccatcatgctattcagaatggcatgcaatttgaaagttaggaattgtttatttctggaattttccatgtaatattcttggaccatgttgaccacaggtaactgtacccagggaaaacaaaactgcttataaggggggactattatatgcctcatgtatacatccaaccagggaaggatgagtaaatctccccttctgttgtatttgattgatttttttttgtagtataccgttttgattctcttctcatttccttttatgcatatcttttttttaaatagaagcaaagtatcactgtgttacccaggctagactagagctcctgggttcaagtgatcctccctcctcagcctcctgagtagctgggagtataggtgcacgccacctcgcctggcttattttcatatatatatcttttagggtttttttcttagtggttaccctggggattatgatgggcatcttaagtttacaactaactagtatgaattaatactaatttagcttcaatagtatatataaaaactgcttctatacagctctacctctcctcctttatgtagttattgtcccaaagtacatctttatatattgtgtgcctatttagagatgaaatctttctcagatttcttagtctgaaatagccaatgagacattcttaagttgaaagcaatataaatattggcacgagttgcttttagatattcaattgttttgtgttaatttaaaaatcccttctgtgcataaacgcattttcttttcattaactatatgtcagaagtttgtttcgttggtttgtttttgtttgagacagagtttcactctgtcacccaggctggagtgaagtggcgtgatcttgcctcactgcaacctccatctcctggattcaagctattctcctgtctcagtcacccgagtagctgggattacaggcatgcgccaccacgcctggctaatttttgtatttttggtagagacggtttcaccatgttgaccaggctggtctcgaactactgacctcaagtgatctgcccgcctcggcctccaaaagtgatgggattataggcgtgagccaccgcgcccagcctatgtgtcagaagttatttttttaaacatttggcagatagaattttttattaagtacaaagaaatttttcctttgttgatttgtttaaatcattggtgtgtgaatatcttgtgaaagcattttaaaaagtggtcataagattcttcaggccgggcgcggtggctcacgcctgtaatcccagcagtttaggaggccgaggtgggcggatcaccaggtcaggagttcaagaccagccttgccaacatagtgaaaccccgtctctactaaaaatacaaaaattagctaggcatggtggcgtgtgcctatagtcccagctactcgggagactgaggcaggagaatcgcttgaatccgggaggcggaggttgcagtaagctgagatcatgccactgcattccagcttgggtgacagtgtgagacttcttattaaaaaaaaaattatttgtaatggttaacattatacctaaaagggcagtatggaatttgctggatttttaaaagataacacaagtgagaagcaaagacaaattttcttagaatcaggcctacataatgaattagacttctgtcctaaaacacaagcagcaattcagactatggaattagcatctttcaaaggtttatttctaattcctctttgagttaaggattatgaggcagaaagataactgtataagcattttcctctttatctttcaaacatattaaatttttaacataatttatataatgttcaggaatttcaagtatcctacttaatatggttttttttttttttttttttttgagacggagtctcgctctgtcgcccaggctggagtgcagtggcgcgatctcggctcactgcaagctctgcctcccgggttcacgccattctcctgcctcagcctcccaagtagctgggactacaggcgcccgccactacgcccggctaattttttgtatttttagtagagacggggtttcaccgttttagccgggatggtctcgatctcctgacctcgtgatccacccgcctcggcctcccaaagtgctgggattacaggcgtgagccaccgcgcccggcccttaatatggttttgcatgtgattgttt

SEQ ID NO: 1300 - DNA, 4721 bp, Homo sapiens
ttatttatttatttgtttgtttgtttgtttgagacggagtctcgctcttttgcccaggccggagtgcagtggcgtgatctcggctcactgcaagctccacctcctgggttcacgccattctcctgcctcagcctcccgagtagctgggactacaggcgcccgccaccatgcccagataattttttgtatttttggtagagacggggtttcactgtgttatccaggatggtctggatctcctgacctcgtgatccgcccgccttggcctcccaaagtgctgggattacaggcgtgagccaccgtgcccggcctgttctttaaaaagaatattagattatattttctaaatgtgccaagtatctaagaatatattctttcacctcctgctgataagagttatacatttaaccttaagcaaatctgccaagattctatgtcatttatgctttgatttatgtgagtattaatgtagtttctgtgactattgtatggttatatataccctccacctagtaaaacagttccatattcctggaaatggtcttttacatcccacaaatgtagctggaaaggaataatataaatactaatggtttgagagacaactagtcttgacatgtcttggttgaatagtgttctataagcaacaatatatgaaatactagacacacccattaaaagtagaaaatacccactactgttctaaaattattctgcaagatctcaccaatgcaatgagacataaaacagaaataatgggtgtaattattgaaaattggagataaaatttttattacttgcaaacaaaattctctgtgtcaaaaacctgataaattaaacaatacaattaatatgtttaatagaactaattacatatgagaggcatccaaaatccattttttctatacaaacatggtttgatatacacagtcttgttttatctgtgtattaattggttgatgaaataataaatggaaaaatcaagtatgcattatcaggttaaagaagcaggagagacagagccataaaaacaaagagagaagaatgttgtaaggagggcttaacgaccaggataaatgttgtagagagatcaattaaagtgatggcctagagatcacaggcttcctttggcagagccatgttggtgaagtgaaggaagtggaagccagaccacaatggttgaagaatgaatgtaatgtaagagccaagacatttatttgagtttgatagtaatgaaaaaggacgagaattttcttcttgctgttgtttttgtcatttcatgttcaaaaccctttatctcccatgtgggactgaaaactccaagatgggatctctgtttctgtgaggcctgtagtgcttagtacatccttgaatgtgtgaggctctcattggtataagtttaattcctgactgtggatgaaagctttaaaactttgcgggcaaaatacagaatgaatttcagtgagttcccatgtattaaacaaggtggcgctggctggagacatgctgtccctgtgcccacaggagtagcagtgctgtgctcatcttcctgacccgctcttcacagtcttcaccgcctttcttcaggagtctcccctttggcttttccacagctatgaaacccacgtagtcggacaccctgatgcttctcctgcagggcgtgtgatgaggaggtgagcttggctttggagtgctgggaacctgaggaattgccaaggacccagagcccagccctgaccacccagagagcccaaaacacaatgaacaaattgaatttccacaacagagtcatgcaagaccgccgcagcgtgtgcattttccttcccaatgatgaatctctgaacatcatcataaatgtgagtagatctcaatataattctgatagctggaggatagtgtattttcaggtttgctggaggaaaaaaactggactttaaataattaagacaaaatgattgtattaattgacttctatgcttaatcactaatttcactttttatatttcccttgacttttgggggagaaatagtctttgtctcaaaagtgggcttcagtgacctatgggtctgatgaagcaaccagggataatgagacaaggatatttaatggcaacatgccagcaattattattagttaattgaaagcgtttatgattttggcctggggccaatgctttccccctctgctgggctaacatgtgggtaagggagaggaaaagctttgtttcactttttaaataaaagtattacgtaactttgaaatttgtataaaattaaaagatagtaaaaacaactattctaacagaattcaaaacctgttatgcttcagtggagagattattcaagataagtccgtgggaaattgggagtacatttctactggcaaagttagtgataactatgcacttctgacaaaatgtgaaatggggggtatgggcgtgtcatatcatcatggtgcagatacgtggatgtgtgcttccaaacaatggcaacctaactgactgctggaaccatacaaaatacctgaaactactcagaaagaaggtgaaaattgcatgcaaaaattatttgaaaaatattgagctaacacaacatgaattttgaattataagtgaggtattgtaactcacctacagatgtgttttttgtaatcaatattcatggactcagactacacagtaaaagcttacatagaaatcattctatctaaactttctggatatgaaagtaacttactatgtgttttgctactatatctttatatgaatttaaatcacatttccaagtggcttacagtaatcaaggttaatttgtcacaaggaagatgcaaattaaaaccacattgcaatatcactgcacacccactagtacggtttaaaagaaaaaaaaacaaaatatcaagtattggtgaaaatgtggagcaaacagaactctttttcaataatggcgggtatgtaaagtggcacaaacactttggaaacctgtttggcattataccatactaaacctgaacacatgcattgtttatgacccaggaatgcccctcctgggaaccaacaacaacgcatatatgtgttgcatatgttcaccaaaagacatttacaagaatgttcatagcagcactatttgaaattgcccccaagtagaagatgcacaaatatttaacagtagttagataaagtgtggtacgtttatgcaatataataccatatagaaacgagagtgagggatctgcaaactaatatgcaactgtacaaatgaatcccacaaatataatgttgggtggcagaagccagatgcaaatgaatacatgctgtagatttcattcttttacattaaaaaagctagtcacacaaagttatgctgttagaagagagtgatttggtcgggcgcaggggtagttacaggaagggagtacacggagatttctggttgttagttatgttcagtgtcaatctaggtgctaaacaggtacaataaagattttagaattcatcaatttgcacacttatgatagatgcactttcctgtatgtatatttcaatacaatcttttaaaaagtaaaatgacaaaaagacactattaacaaaaatgacatattacattaactgttatactaaggaaaatataaaaatgagttctataacaggggctctgcaggtcatgtggtcatgccaaggaccatatgtgctcaagattctcatgacattttggaaggaggttgggctttctttatctttcctttcttctctcccttcccttcccttccctatttttaaacctaggtttggtattttcctggggtgatggtgactttggaaaattgggccggggcggaagtgaaggctgcaacattccccagaacattgagagactaaatggacagggggtgtgccagattgagtgtggagctcagttcctactggcgctcaccaagtctggagtggtgtggacatggtacgtaaacgtcctccccatcacagtgtgcgtgcttgtgccggtgcgtgcagggaacttgggcctcgccccaggaccaccccggcgtgattgtgacctgtcatatttttacttatgcatgcatctttgtcctttaaaggatattgagtcgggattagtgacaatagtacaagaagaaatttcctattgtaactgggtcattttgaaaatactagaaaaattttaggccacttacctttcctgtttgggcgagatttataggaagtgtttcttctgctgaagcctaaggataaaatgagagcaaaatagccttctgaatcctttgatcctgagaaagttaacatgtatttcttgttaaagcttattatattaatgtgcaaaagagcaggtgcccagactggccttggatgctgtgtcaggccttgctgcctctggtcataacattggcactatttatttatttatttatttgagatggagtctcgctctatcgcccaggctggaatgcagtggcacaatctcagctcattgcaagctccgcctccggggttcacaccattctcctgcctcagcctcccgagtagctgggactacaggtgtctgccaccatgcccggctaatttttttgtatttttagtagagatggggtttcaccgtgttagccaggatggtctcaatctcctgacctcgtgatccacccacctcagcctcccaaagtgctgggattacaggcgtgaaccaccgcgactggccaacattggcac

SEQ ID NO: 1301 - DNA, 5635 bp, Homo sapiens
taacattttaaaaattgctgtattcaaaattaataataaactttggggtaaataagctttaaaacaaaagtacataagcaaaaataaataatttacaccaacccactaacctaattttcagagtaaagccatttccaattacagtactgttatcccgggcaccagcctgtggttaaactttgatgattcattatttttaaaaaacagtaataaaaattgaatactaagcaaaatctttaacaaaaccactggatttaactttttaattttaaataaccaaattttataattttgtacataattcaatgtaatgccaatataattagcatttcagcttgaagagctggtttttaacagggatgggaaactataaattattcaaacagtctgcaaaccatgagatacaaataaaaatggacaagcatatagtagaacaaaaaccgcagacactctactaactggggaaatatctgaaggctttacaccctttattatccataatggcttttggaattacgattgtgtgacatatagaacctttgatattttagatacagcctttatttttttttccacgggaagttaaaaatccatcataagactccataagactttactagtcttgcatgtagactctaggagtttgtgatctgataaaagagtaacatgaaaatttactgtattgccctaatttcatacttccttgtacacaatgaatcactctgagaatctattccaagggttatatacacaaaagtgtcaagaataaaatgttctccactctcgcataaaaatgtgtacagtgtatcaggaatggaaaacttctaattttcctgggcccgggcttcatggatttctgctgccagaagatgaaagactccttctgctttattgctccattgttctgaggattaatcatccaaccctggcgtttctccttgttggattctagacgctattctgatggcttcttccagagatggctgttctccaagctgaaacaggaacacacacatcaaacgctaacaattcaaaagccacagtcaagaaaatgccaaagaaatgttatatgccagaagtgaaacttctctctgtaattctgacacttgggattgttaaaatactactgctaactcaaacattaagagaacaaaacaatttcctgcaggggagaataatgcaatgcaatttctttttcttttttgaatttcaaatcctatgtgcagccaggcctggtgatatgatgaggtctcagcggggcatggtggcccatgcctgtaatcccaacactttgggaggtggaggcaggcagattgcttgagcccaggagttcgagaccagcctgagcaacatggcaaaacgccccatctctactaaaaaaatacaaaaattggctgggcgcggtggctcacgcctgtaatctcagcacttcgggaggccgaggcgggcagatcacgaggtcaggagattgagaccatcctggctaacacagtgaaaccccatttcatttctactaaaaaatacaaaaaaaaaattgctgggcgtggtgatgggtgcctgtagtcccagctactggggaggctgagggaggagaatggcatgaacccaggaggcggagcttgcagtgagccaagatggtgccactgcactccagcctgggtgacagagcgagactccgtctcaaaaaacaaaaattagctgcgcatggcagcgtgcacctgtactcccagcctgccgtgcctggcctgcaatttacttgggattttgataaaatcttcatacagtctggccatggtggctcatgactataatcgtagcactttgggaggctgaggcaggaggatcacttgagcccaggagttcaagaccagcctgagcaacatagtgagaccccatctctatttatttttacataaataaaaactaaaaaaaaaaaaaattcatacatgcaagagacaaaagatgcttacctcagccaacaaaagagagcttcttgagcctttagcttctatacccataaactacataaagccaacagctgacatttcctggagtgtgttctaactctttatcaagtaaacacgtgggcggaaaaaaaatctccctaaggacaggtaatctgcacctagcccctaggattctattttactttacattctaattttttttttgagacagggtctcgctctgttgcccaggctggagtacagtggtgcgatcttggctcactgcagcctcaacctcccttgctcaagtgatccttccacctcagccacctgagtagctgggactacaggtgcacaccaccacacctggctaatttttgtatttttgtagagatggggtttcgtcatgttgcctgggctggtctcttattttttgagatggggtctcatttgttacccaggcgggagtgcagtggcacaatcttggctcactgcagcctcaaatctcctgggtacaagtaatcctcctgcctcagcaccccccaagtagctgggcactacaggcagccgtcaccacacccagctaatttttgtgttttttgtagtgatggttttcaccatgttgcccaggctggtctctaattcctaagctcaagctacctacctgtctcagcctcccaaagtgctaggattatagggatgagccaccatgcccggctgcacctaagattctaaattctctgcttcccagagaatgattccttctaagtcttctgacattccccactttaaaatgggggctgtgcaaggattctcagaggacttatttaggatttgtgtttccactaggtttttctctaaggagtagctcttaagtgctttacagacccctgcctaattagacttttattttgagagtaaagatgcctgggtgggtgcacacagggatatatacctgaaggttttttttcttgctataaattcccctagaatatgcaaagatgggtagagaacaaagtgctggtctttttgagtccacctcaaatacaccgatttccttaaagtaggctaggtgatagagattattctacaccttgcctcctgtaaaggttatacacgaagcacagtgtacaaagttgaaagctatgagcagcactgctgtcgactgaggacagtatgccttggtactcacctgaactgcaatctgggtgccattggatgttgctactaaggtcagaggtctggtttctgtggttactaagtgatggctatgctgctggtgccccatttctgatgaggcagtatggaatgctgccaagtcttgagctacaattgcaaccttaagcaaaacaaaacaaaccatacacataaagaattaaacctgcgatttaaataggttaaagtccacttaatacaatggatttcttcaaattgaaaaggaaaaactcctctgaccatagacttgtcaaagcctatattgaaaggaggtttatttgaggaagttgaggctcattatctaaggttatgaagtgagccaacggcaaaatagggtagagaacactggagaaatggatctgctatgccaggccccattagccagggagatgtggctgtacctagattctattacccctaagtgactgcttgggaagttatgtatgtggactaatttgcacctcaaatgtccatttttttttcctgagattggctcataggagaaaataaatgatttttttcctctttacttgtcgtatttaaaattagatttccatttaactaggaaaactgaaaggaccagtggtactactgacaaacagcatctcatctcatactcatttcccattttagactccatggaatcttcccatactcctcttgcagcatctagccaggaggattaaaagggcttttgtggctcttataccacaagtacaactttttaaaaaaatgcagataacatggaaaatggcaattaactatttctgttagatgatattctaaaattttactcagccaaattcagagaaagaatagattaaaaatgaaaactgctgttttacttggctattcatccactaaaaatgctacattttaagctaatagatatttagcttggatcaatcccaataatgttccctaattctataagaaaaacagatttcattccagcaatgtctaagtagcttatattgggctaaccttcctgcagataacaattataaacccttgacaaaaatatgaaaaagcaactatatgaaggctttgaggagcaatgacaagcaggaagaaactagaggggattctcaaaagaagggagtcacactgtgttatatctgtgtttaaatagatttcacactgagggcactacccagtttgagcagcctggggcaacttaaggttaaagataatggagtccagggctgccagaatagcagtacagagaagaatagcccagaaagcaaagaatttgagtgggaagcccccaaatctttgtataaactgtcctcaaatcctttttttttttttttttttttgaggtagtctcgctctgtcgcccaagctggaatgcaatggcttgatctcagctcactgcaaactctgcctcccaggttcaagcgattcttctgcctcagcctcccgagtagctgggattacaggcatgcggcacctcactcggctaatttttgtatttttagtagaaacagggtttctccaagttggtcaggctggtctcgaactcctgacctcaggcgatccacccgcctcggcctcccaaagcgctgggattacagacgtgagcccccgcgcccagccagaataataattattattattatatattttttgagacggagtctcactttgtcgcccaggctggagtgcagtggcgccgtcttggctcactgcaagctccgcctcccgggttcacgccattctcctgcctcagcctcccgagtagctgggattacaggcgcccgccatcacgcccagctaattttttgtattttttagtagagacggggtttcaccgtgttagccaggatggtctcgatctcctgacctcgtgatccgcccgcctcagcctcccaaagtgctgggattacaggcgtgagccaccgcgcccggcctcaaatccttaagacccctcaacacaaatatttccggtttccgacaacattccaacaagactggcaaagcagcatctagaaggctgagaaactaaggagagctttcagtgcaactcaccaaagagagacggaatttgaagtttcaatcttaccaagttaggaggtaagattacgtcccaggactaaatattcaccctaagaccttatagcaacactgaaacagacctgccttaacaaagtacaaaacccagccacaacacgtaatttaactagctaatagaaaaaaaaaatcaatattctccagagaaagataacaaaattcagaatctctataatgtgtcatccacaaggtccagaatgcaattttaaaattacaattgcttagccaggcatgatggctcacgcttgtaatcctagcactttgggaggccgaggtgggtggatcacctgaggtcaggagttcgagatcagcctggccaacatggtgaaagcccacctctactaaaaaaaaaaatacaaaaaattagctgggcatggtggcgggtgcctgtagtcccagct

SEQ ID NO: 1302 - DNA, 209 bp, Homo sapiens
ttcacgccattctcctgcttcagcctcccaagtagctgggactacaggcgtccgacaccatgcccagctaatttttttgtatttcttagtagagacgggtttcaccgtgttagccaggatggtctcgatctcctgacctcgtgatccgcccgcctcagcctcccaaagtcctgggattacaggcatgagccaccgtgcccggcccaaaa

SEQ ID NO: 1303 - DNA, 139 bp, Homo sapiens
ttttttttgtatttttagtaggcacggggtttcaccatgttagccaggatggtctcgatctcctgaccttgtgatccacccgcctcagcctcccgaagtactgggattacaggcgtgagccaccgcgcccggcctaaaa

SEQ ID NO: 1304 - DNA, 108 bp, Homo sapiens
gggtttcactgtgttagccaggatggtctcaatctcctgacctcgtgttccactcacctcagcctcccaaagtactgggattacaagcgtgagccaccgcgcctggcc

SEQ ID NO: 1305 - DNA, 138 bp, Homo sapiens
tttttttttgtatttttagtagagacggtgtttcaccgtgttagccaggatggtctcaatctcctgaccttgtgaaccaccctcctcagcctcccaacgtgctggaattacaggcgtgagccaccgtgcctggcccaa

SEQ ID NO: 1306 - DNA, 323 bp, Homo sapiens
attttttttttcttttttttggagacggggtctcattctgtcacccaggctggggtgcagtggcacaatctcggctcacggcaagctctgcctcccgggttcacgccattctcctgcctcagcctcccgagtagctgggactacaggcgcccgccaccacgcccggctaattttttgtatttttagtagagacggggtttcaccgtgttagccaggatggtctcaatctcctgacctcgtgatccgcctgcctcggcctcccaaagtgctgggattacaggcgtgagccaccgcgcctggccaacaatttttttttttttttt

SEQ ID NO: 1307 - DNA, 358 bp, Homo sapiens
ttttttttttttttttttttttttttttgagacagagtctcgctctgttgcccaggctggagtgcagtggcatgatcttggctcactgcaagctccgcctcctgggttcacgccaggagttcacatgggttcacaccaggagttcacacctgggttcacgcctacctcagcctcccgagtagctgggactacaggtggccgccaccacgcccggctaattttttgtatttttagtagagacggggtttcaccgtgttagccaggatggtctcgatctcctgacctcgtgatccacccgcctcggcctcccaaagtgctgggattacaggcgatgagccaccgtgcccggccaggaatc

SEQ ID NO: 1308 - DNA, 427 bp, Homo sapiens
gaatttgtctaattcctttttttttttttttttgagacggagtctcgctctgtggcccaggcgggagtgcagtggcgcaatctcggctcactgcaagctccgcctccagggttcacgccattctcctgcctcagcctcccgagtagctgggactacaggtgcccaccatcacgcccggctaattttttttgtatttttagtagagacggggtttcaccgtgttagccaggatggtctcgatctcctgacctcgtgatccgcccgcctcggcctcccaaagtgctgggattacaagcgtgagccaccgcgcccggccgagaatttgtctaattcagatactcccaaataagcagatcattttgtatgtaaaatggaaatatgtccattctgttctgtgacataatataacttgatgaatctgagtctt

SEQ ID NO: 1309 - DNA, 549 bp, Homo sapiens
gctcactgcaagctccgcctcccaggttcacgccattctcctgcctcagcctctggagtagctgggactacaggtgcccgccaccacgcccagataatttttttttttttgtattttttagtagagatggggtttcaccgtgttagccaggatggtctcaatctcctgaccttgtgatccacccgcctcagcctcccaaagtgctgggattacaggcgagagccaccgcgcctggcccaaaataagaattttttttttttttttgagatggagtcttgctctgttgcccaggctggagtgcagtggtgcgatctcggctcactgcaagctccacctcccaggttcacgccattctcctgcctcagcctcccgagttgctgggactacaggcgcccaccaccatgcctggctaattttttgtatttttagtagagatgtggtttcaccatgttagccaggatggtctcgatctcctgacccgtgatctgcccgcctcggcctcccaaagtgctgggattacaggcgtgagccaccacacctggcccaaaa

SEQ ID NO: 1310 - DNA, 5059 bp, Homo sapiens
gagaatctttttctttttttttctttttttgagacggagtctcgctctgtcgccgaggctggagtgcagtggcgcaatctcggctcactgcaagctccgcctcccaggctcccgccattctcatgcctcaggctcccgaatagctgggactacaggcacccaccaccacacccggctaattttttgtatttttagtagagacggggtttcaccgtgttagccaggatggtctcaatctcctgacctcgtgatccgcccgcctccgcctcccaaagtgctgggattacaggcatgagccaccgcgcccggccgagagtctttaattttctactttgtatatttctatattaactttgaaagaacacccatttattaccttttaactagtaaaagcaataaaaataagaaaagttaatactatcatagtaatactattgttgtcattccaagaaaaaaatatattaaaaatatttatttgaaaaaataaataaataaaaataaaaatgagattgaaaggaatggccagagaagtaagacaaagaagaggcatgatgggtcacagaagtcaatgtatcgaagtatttcaaggagtatttcttgtcatattttgcttgacaggtcaagtgagatgaggactaaaagtatccattggatttagtgatttgatagtcattggtgaccttatcaccacaaactgaggaagtcagattagagtgtgttatattaataagggagtaagaagaaggaaatggaaaaagaatagttatgtcaagaagtttggctacaacagatagaagggtgttaggtggtagctagagagggatgtgaactcaagggaaattatttttgtaagactggagaaactagagcatatttaaatgtcaataaaaacatgtcaatgaggccagatgcagtggctcacgcctgtaatcccagcactttgggcgggtggatcacctgaggtcaggagttcaagaacagcctggccaacgtggtgaaacctcgtctctactaaaaatacaaaaattagctgggtatggtggcgggcacctgtaatcccagctactcgggaggctgaggcaggagaatcgcttgaacccaggaggtggaggttgcagtgagccaagatcctgccattgcactccagcctgggcaacaagagaaaaactccgtctcaaaaaaaaaaaaaaaaaaaaaaaactcaatgagcgggaattgttgaataaacaggagagagaagggataattaatagtggaaggtttctgggaaggtgtgaggggatagcatacagtaggaagaaatgagaagtataaaaggaggtagggagaggatttgttctaatgtgagcaaatatgtagatttgatggtgggaaatgggggattaaatgagataatgcatgcaaagcacttagcatagtgcctggcacagttagtttgtatcagaaatggtaactatggctattgttgtttttcatgtcatacacctgcttgaaaatttctcaccttttaggctttgtccatgtgaaatgagctagtaccctactttattaatgctataaatttcaatttttatttttttgagacagagtctagctctgttgcccaggctggagtgcagtggcatgatcttggctcactgcaacctccacttcccggtttcaggtgattctcctgcctcagcctcctgagtagctgggattacaggtgcccaccattatgcccggctaaattttgtatttttactagaggagaggtttcaccacgttggccaggctggtctcgaactcctggcctcaagtgatctgcccaccttggcctcccaaagtgctgggattacaggtgagagccaccgcacttgactttcaaattttctatattgaatttatatacaacgagggttacttgaacttttgttttgttttgttttatttttatttttatttttggagacggagtctcactctgtcgcccaggctggagtgcagtggcatgatctcggctcactgcaagctccgcctcccaggttcacgccattctcctgcctcagcctccccgagtagctgggactacaggtacccaccaccacgcccaactaatttttgtttttgtatttttagtagagatggggtttcaccgtgttagccaggatggtcacgatttcctgacctcgtgatccacctgcctcagcctcccaaagtgctgggattataggcgtgagtcaccacacctggccgagggttacttgaacttttgattcctcacctctgttctcttcagaacttctggatatttgctggttccctgattttgataagaagaaaaaagttgtacatttaagattaatgggctgggtgcagtgggtcacacatgtaaccccagcactttgggaggccaaggcaggcgaattacttgaggtcaggagttcaagaccagtctggccaacatggtgaaacttcatctctactaaaaatacaaaaattagccggtcgttgttgcgtgtgtctgtaacccagcactttgggatgctgaggcgggcagatcgcttgagtccaggagttcaagaccagtctggccaacatggcaaaaccccatctctacaaaaaatacaaaaattaggcagttgtggtggcgtgtgcctgtggtcccagctactcgggaggctgaggtgagaggatcacttgagtctgggagatgaatgttgcagtgagccaagatggcaccactgcactccagactggatgatagagcaagacaccatttcaacaacaacaacaacaaaaaaaaaaaaaaaaaaaaaaagagagagagagatcactcctcactcctccctcctcctctgattaagaatctacatttgaggctgggtgctgtggctcacacttgtaatcccagcactttagggggccaaggcgggtggatcacaaggtcaggagttcaagagcagtccggccaagctggtgaaaccccgtctctactaaaaatacaaaaaattactcgggtttggtggcgggtgcctgtaatcccagctactcgggagactgaggtaggagaatcacttgaacccgggaggcagaggttgcggtgagctgagattgcaccattgcactccagcctgggcaacaagagtgaaactccgtctcatagatagatagatagttagatagatagataaatagatagatagatagatagatagatagatagatagatagatagaatctacatttggccgggtgcaatggctcacacctgtaatcccaacactttgggaggctgagctgggaggattgcttgaggccagaagtttgagaccagcctgggaaacagcaaaatccggcctctactaaaaatacaaaaaattagccaggcatggtggcgcacgcctgtagtcccagcttctcaggaggctgaggtgggaggattgcttgagccggggaggtcacagctgcagtgagccatgatcatgctactgcactccagcctgggtgacagagtaaaactctgcttcaaaaaaaaaaaaaaaaaaaaagaattggctgggcatggtggctcacacctataatcccaacactttgggagaccgaggtgggcagatcacttgaggctaggagtttgagactagcctgaccaacatggcaaaaccccgtctctactaaaaatataaaaattagccgggcatggtggtgcatgcctgtagtcccagctaatcgtgagggtaaggcagagaatcgcttgaacctgggagacagaggttgcagtgagccaagactgcggccgctgtgtgcctgggagacagagcgagaccctgtctttaaaaaaaaaacaaaaaagagaatctacattctttttttttttatttaaaggcctataatgcccttttaactctctttttaaatcattttcaaaatccttgacctagaattttaggttcctgttaatctagccacactccatttaactttttcatcttctttcttcaacataacctctgacatgttaccactgcttacaaatagaaagaggactaagcttggagagactctgaagagaagcatttactttttactctacatacttctgcatttaatttttttacagtgataatgtactacatttggaatttaaaatgaaacacaataaataaattaaaacaacttttgccctagtatcactctccctaatctttcatacccatcaaaattaatttctcattattcagatttccattcaaatgtacaggtgacacttgaacaagggttttaactgcatgggtccacttatatgtggattttcttctgcctctgctacccctgagatagcaagaccaacccctcatcttcctcctcctcctcctcagcctactcaatatgaagacagtgatgaagaactttatgataatccacttccgcttaatgaataatgcatatattttcccttccttattttattttattttatttttagacaaggtctcactctgttgcctaggctggagtgcattgcgacaatcatggcttactgcagcttcgatctcctgggctcaggtgatcctcccaccttaccttcccaagtagctgggactacaggtgtgcgctactatgactggctaatttttttgtatgtttttgtagagagggggttttgtcatgttgtacaggctggtcttgaactggacacaagtaatctgcccacctcggccacccaaagtgctaggattacacgcatgagccacctcacccagccccttatgattttcctttttttttttttttttgagacgcagtcttgttctgtcgcccaggctggagtgcagtggcacaatctcggctcactgcaagctccgcctcccgggttcacaccattctcctgcctcagcctcccgagtagctgggactacaggcgcctgccactacgcccagctaatttgtgttttttttgtatttttagtagagacggggtttcaccgtgttagccaggatggtctcgatctcctgacctcgtgatccgcccgtcttggcctcccaaagtgctgggattacaggcgtgagcaaccatgcc

SEQ ID NO: 1311 - DNA, 129 bp, Homo sapiens
tttttttttgtatttttagtagagacagggtttcaccgtgttagccaggatggtctcgatctcctgaccttgtgatccgccagccttggcctcccaaagtgctgggattacaggcgtgagccaccgcac

SEQ ID NO: 1312 - DNA, 1939 bp, Homo sapiens
ccaagtaggttcccctgtaacctcctacaaagcaatattccaaaggaacattttaactgtaaaggctggagacaagaaaaaataagtagatcgttttaataacaattatttaattgcctataagtttgctgtttcagaggctagcccaaaggcatcaaatttaataaagttaaacaaattgatttacttcagagcaaatatgatcctattaaaataatatagggtaaataccctacctcttagaaagggcaaaaatgcaaagaagctttctttaaaactaaaagggttttttggggggggagttggcggggaggaaataaggctaacagaggttgacctaaaattagccttacaaaggagaaaggaccacattgcttacttgaaacagacaatgaaaacaaccaaagtgatatataaaatagttgatgagaactagacttatgactgtagtttactagagtttagttttcagttgctgaagtagctcattttctcttactaatgtttggttcctcagggaagaatctcacttgactagagaggaggtgggaacagaagagagaaggaggcagggagatgtatttcttagggctcaccccttcacagactgacagaatggttttgttttgttttgttttgttttgttttgtttttgagatggactctagctctgtcacccaggctggagtgcagtggtgcgatctcggctcactgcaagctccgcctcccgggttctcaccattctcctgcctcagcctcccgagtagctgggactacaggcgcccaccaccacgcccggctaattttttgtattttttagtagagacggggtttcaccatgttagccaggatggtctcgatctcctgacctcgtgatccgcccgcctcggcctcccaaagtgctgggattacaggcgtgagccaccgtgcctgccccagaatggtttttaaagccacagttgagaggccacccattgcccggcgcctggacagtgatcatcttgttcatcttgttcagtcctttcttgtgtgattggaattattcatcccctttgaaagatgagaaggttgagatgcaaagagtctacctttccaagttctcactgctggaaagagctagaagcacagttcaaagttctggcttctggactctgcagtccaggtctcccttctcccacttgcctaccctcaatgccacactgtttttgaagtggcccataacttgaaggaaaagtttaaagacagttcaatttaatcatcagaatgcattcttttttttttcggagacggagtttcactcttgctgcccaggctggagtgcaatggtgcaatgacctcggctcactgcaacctctgcctcctgggttcaagtgattctccagcctcagcctcccgagtagctgggattatgggcgcccaccaccatgcccagctaatttttgtattttttttttttagtagagatggggtttcgccaggttggccaggctggtcttgtgaactcctggcctcaggtgatctgcccacctcatcctccaaaagtgctgggattacaggcatgagccactgcgcctggcctcagaatgcattcttacacatctatcctagacatttataagcactctaatggataacaatccaagaataaatgattgtaaaagatgatgccgaagagttgatgtcaatctttttttcctaagaaaaaaagtccgcgagtattaaatatttagatcaatgtttataaaatgattactttgtatatctcattattcctattttggaataaaaactgaccttctttaatcatatacttgtcttttgtaaatagcagcttttgtgtcattctccccactttattagttaatttaaattggaaaaaaccctcaaactaatattcttgtctgttccagtcttataaataaaacttataatgcatgta

SEQ ID NO: 1313 - DNA, 139 bp, Homo sapiens
ttttttttgtgtatttttagtagagacggggtttcaccgtgttagccaggatggtctcgatctcctgacctcgtgatcacccgcctcggcgtcccaaagtgctgggattacaggcgtgagccaccgtgcctggccgaaa

SEQ ID NO: 1314 - DNA, 47567 bp, Homo sapiens; identical to SEQ ID NO: 1269

SEQ ID NO: 1315 - DNA, 141 bp, Homo sapiens
ttttttttttgtatttttttagtagagatggggtttcatcctgttagccaggatggtcttgatctcctgaccttgtgatccacccgcctcagcctcccaaagtgctgggattacaggcatagccaccgcgcctggccctaa

SEQ ID NO: 1316 - DNA, 54877 bp, Homo sapiens
acaaatgagaaagtttcatttacctcaaaaaaatccaggctatacaaacagacaactgaaagccacataggaaatttccgaaacacaaaagaaaaagtctcacctacaagattatttacatgtttagggccagtattattaaaagacgtcatcccctaggtctagtagaaacatatagagaagtctatgctaacacacttggaaagaggactattgtccttccttgcacatgacaaaaaccaaatgaaccaaacccctagaaggtattaatgcacaaaggttttaataccttggctttaatgatttttcaaggttaagaaacaaattcaaattggttggagcttcaactcagtaattacaatcacaatgcatctctgaaaggccctgcatttggaggcagagtaatctgcaaagatgatagtttttacatatgtcctgttacctacaccaatataattactacattatcttataaagacaaacagttgcttcaaactctttaaaaaatatatatataatgagtttcccaaagactcgagtctatattcaaagatgagtaaaaaaaaatccattacttccctagggtcactttcttcctttactcctgcttaaatgcaaaagctgatagtttctgatttgtagaaaaatctaaaggtttctgctttttagacaaattcaggttctcttttgctttttcttcctggttttctgtttcatcactttcatcaaccacacgttttcgcttctttgcttcagttccttcacttgccgtttctcctttggctttgttagcccacacctttgtaaaatggcaggagtgaaaaggaaagatttttagaaaataacaaataagaagtaaatgatttatttacttttccaggtaatatttttatatataaagcagaataattagcacttgaattaagtgttctcattgttaacaaatcttttattacttaaatgcagagcacattaaagatttacactacttttatatctcaatctaagctttgcttatattaatcatattagttgcaaaatactataattgcagtactatttaaaaatgaaacttttggccaggcacggtggctcatgtctgtaatcccagcactttgggaggccgaggtgggtggatcacggggtcaggagactgagaccatcctggctaacacagtgaaaccccgtctctactaaaaatacaaaaaaattagccgggcatggtagcgggcgcctgtagtcccagctacttgggaggctgaggcaggagactagagtgaacccgggaggtggagcctgcagtgagctgagatcacgccactgcactccagcctgggcgagagcaagactccgtctcaaaaaataaataaataaataaataaataaataataaaaatgaaactttttattctaagataattgcagtttcacatgcagttgtatgaaataatacagaaagatcctgtgtagccttcacccagttttccccagtggtaacattttgcaaaactatagcccaacaatcacaactatagggaactgacattgaaacaatcccattttacttctactcatttgagcgtatgtatgtatttacttttattgtgggttggtttgtttaccaccacagtcaaaatacagaacctcttccccaagccccaactccgactccaacccctggcaaccactactctattctccatcttgatcatgttgtcatttcaggaatgttatataaatgagtatatattctttggggtttggtttttattcactcagcaagagccagacaaggtccattcatttcatctgtctctaaaatctcttttaatctataatagttccccactcctactttatttccctggccatttcaagggctcttcaagctgtagaatttctcacattaacaaactggatttaagtaaatgtttagggtttaccttaaaaatactgattacatttttaagtattcaaaaacacaatcacagactttgccaagtctcttcctcttttgcagtgtaaagtcttatttatttagacgccattttattgaacaacaaatgagaaacataaaattgtaaatgaggttctaaatgacgctaaaggtgtttaaaccagtttctggcttcctcattatgcaacacctttttcataaaacccaatttaccaaagcaagtatctacgttactaggtgcctgtgctgcgccctgccattcctggggaagtgaaacctgaggatttaactggtacaccacacacattccttccacttctaactgagagattgtgccttccttccttcacatggcagaagtttatcagaagcaagccagccacctgtcctaatttccatgtgaaaggctggaacagaacaccagtctttttcccaaaaggaatagtctcatgtagtatttaatgtgtaagtagatacaatttttaaaaattctgcttgcaagaaccctaaagtagtattcaaaaaatgtgaattcatttttacttattaatttttttccccctagagacccggtctcactctgtcacccatgctggagtacagtgacacaatcacggctcactgcagccttgacctcctgggctcaagtaagtgatcttcccacctcaacctcctgagtaactgggactacaggtgtgtgccaccatgccaggctaatttttaaatttttgtagagatggtgtatcactatgttgtctaggctggtctcaaactcctgggctcaagagatcctcctgccttggcctcccaaagtgctaggattacaggcttgagccaacgaactcagcttgacacttttgatttttaacaaatgcatcttttcttggggtattctcctaacttaaaacatacaggaacttatagagattaaaacagtaaaccgtcaaaaaattaaccatccagcctgggcaacacagtgagaggttgtctctataaaaaaaaaaaagaggacaattgcttgtgcccaggaggtcgaggtggcagtgagccatgatcacaccacgacactcctgcctgggtgaaagaacaagacctgcctcaaacaaaaacaaaacaaaaaacccatcaccattacataataattactacatatccatattaccatatatccgcacttactttcctctttaaaaagtttggtggatgtattcaatttccaaaaacagaaaaaggcttttccttttttttttagttgtcatgatcgttattatctttgttgttgttattattattattagagacgatgtctcactatgttgcccaggctggtcacgaactcctgagctcaagtgatccgcctcgacctcccaatgtgctaggattacaggcataagacaccatacccagccaaaaggcatttctataagaattttttaaatctgggaattcactaagatctcaatctcggcacaattatccttacctttctttcttcagttgacaatactctaaatcgaatcattccttcttttattatgtctgcttcatctgaaaagtcaggattgtcagacaaaatattacttctattttcttctaaccacatctggaacccggtctttggcctaaaatcacaattatgtgaaaacattttatacttaagacagagtttaaagtgcctcatgattttaagttagtaatcaaccataagtctctgacatctattatataaagtaaggaagacacagttacacttgttaattcatgttactttttttttttttttttttttgagacagagtctcactctgtcacccagcctggagtgcaatggcgcgatctcagctcactgcaacctccgcctcctgggttcaagcgattctcctgcctcagcctcccaagtagctgggattacaggcatgcgccaccacacctggctaattttttgcatggggtttcaccatgttggtcaggctggtctcaaactcctgacctcacgtgatctgcccgcctcggcttcccaaactgctgggattacaggcataagccaccgtgcctggcctcatattactttaaactgcctggagactgcaggatcaatgaactggaaaatcctttgtaaggtcaattcaaaaggatcactcacgtttgtattttccaagtgcagcaaccatgaactctgtactttcaactttttaatgaatgttgacaggctcaaggtctccaacctcacttagcccttgtggcctaccacatgtccttggtaggctctttttctatttccccaaaccagctatttgaattcctcacgacttttctcaagcccctttgccatcgcctcacccttgctctcagagctgacctgcatcagcattaggtgaagcacggacacagcacatttgtacatttcattagattccactcacaatacaaattgtctttaagtcacacaagtgaaggtttaatgcaaatatttaacatttactgatcacttactatctaccaggcactactctaaaagctttatgtatagtacctcatttaaatgacaataacactatgagatggatacagttattatctccattccataagtgagaaaagggaggctcagagatgtgaaataacctatcccaggttacacaaacagtaaaactcagacctgggatccaacaaccaggcaatttgactccaaagtctatgtttttttgtagagatggagtctagctctttcccctatgctggagtacagtggctctgtattggcttactgcaacctccaccttccaggttcaagtgattctcctgcctcagcctcccaaacagctgggactacaggtacgcgccaccacacccagctaatttttgtatttttagtaaagacagggtttcaccatattggccaggtgggtctcgaactcctgacctcatgatccactcgcctcggcctcccaaagtgctgggattacaggcgtgagccactgtgcctggcccagagtctcttatgtttaacccagcagctatacgcccctcactaggctgaacctaaatgaatcctaaataaaaagtctaaactttttaaggttaaaaaaatttttattaaaaaattactagtatgaccataaccatttgcccaatttctgaaaatatgcaaattttaagtaatcttaacgtaaaccgatttccagaaaaataacagaacaaatcaaaacaagtaaaaatcaaggtataacaaaggttcctgaatttccaaaaattaatgaagacccattttaatgaaacttggggcaatgtcacaagtctacttagtggcctgcaatcatctacttctaaacagctatttttaaaaagaaaaccaaaattgaacatttctttctttgttttttaaagagacgtgagtctcactatgttgcctaggctggcctcaaacttctgggcttaagcaacccttctgactcaaccttctgagtggctaggactacaagagtgcacagccacctggctaaaactggacatttctgattaagtatatcaacatctgtgacaaaatattagtttcaatagtggtaattccttaaaatttcaaaagtaagttttttgtataaccaactgatagtatgaaaaattaaattatcaatcttctttgttgttgttttaagagaaagggtcttgctttgtcgcccaggctggagtgcagtggtataatcagctcactgccacctcaaattcctgggctcaagcaatcctcctgcctcagactctcaagcagttgggactacaggcatgtgccaccacacacacctggctgattttaaaacttttggtagagatggggtctccctacattgcccaggctggttccaatctcctgggctgaagctaactgatcatgttggccttccaaagtgttaggcttggccaggtgtggtggctcacacctgtaaccccagcactttgggaagccgagatgggcaaatcgcttgaggccaagagtttgagaccagcctggccaacgtggcaaactccatctctaccaaaaaataacaaaattagtgggcatggtggcacacacctgtaatcccagctactcaggaggctgaggcatgagaattgcttgaacccagaaggtggaggttgcagtgagctgagattgcaccagtggactccagccttggtgacagggcaagactgtctcaaaaaaagtgttaggcgggccaggcatggtggctcacacctgtaatccctgcactttgggaggccaaggcgggtggatcacctgaggtcaggagttcaagaccagcctgaccaacatggagaaacctcatctctactaaaaatacaaaattagtcgggcatggttgcgcatgcctgtaatcacagctactcaggaggctgagacaggagaatcacttgaacccagaggcagaggttgcagtgagccgagattgtgccattgcattgcagtctgggcaacaagagcaaaaagaaaaaagtgttaagcggaaaaaaaaccatgagccactatgcccggcctatcaattttcttaaataaaattttcactgtttaagacctaaattaaattcagaacaaaacaggaaatgtgaaaaccacagccactccctcaaactggttaacataaagtcattaagaaaataagatatactttattattatttttctccctggactgttcagcatgagaaaaatgagatatattatggtaaaaatgaaattgtgactgttcttttctttttgttttttctgagatggagtctcactctgttgcccaggctggagtgcagtggcacaatcttggctcattgcagcctccgtctcctgtgttcaagcgattctcctgcctcagcctcccaagtagctgggattacaggcatgagccaccatacctggcaaacttttgtatttttaatagagatggggtttcaccatgttggccaggctggtctcgaactcttgacctcaagtgatccgcccacctcagcctcccaaagtgctgggattacaggcgtgagccactgtgccaggccaaaattgtgacttttcaaatttaacggatatattaaaaataaggccaggagtggtggctcacacctgtaattccagcactttgggaggccaaggtgggcagatcacctgaggtcaggagtttgagaccagcctgaccaacatggagaaacctcgtctctactaaagatacaaaattaagcggttccaagatggtcgaataggaagagcttcagcctacagctcccagcatgagcgatgcagaagacgggtgatttctgcacttccaactgaggtaccaggttcatctcactagggcttgtcggacagtgggcgcagaacagggggtgtggcacaccgagtgtgagctgaagcagggcaaggcatcacctcacccgggaagcgcaaggggtcagaaaattccctttcctagccaagcaaagctgtgacacacagcacctggaaaattgggtcacccccaccctaatactgtgcttttccaatggtcttagcaaacggcacaccaggagattatatcccactcctggctcagagggtcccatgcccatggagcctcactcattgctagcacagcagtctgagattgaactacaaggcggcagcctcagccaggaaactcgaactgggtggagcccactgaagctcaaggagtcctgcctgcctctgtggactccacctctgggggcagggcatagccgaacaaaggcagcagaaacctctacagatttaaatgtccctgtctgacagctttgaagagagtagtggttctcccagcacagagtttgagatctgagaatggacagactgcctcctcagtgacaggtgggtccatgatccacaagtagcctaactgggaggcaccccccagtaggggcagactgacacctcacacggccgggtacccctctgagacgaggcttccagaggaatgaccaggcagcaacatttgctgttcaccaatatttgctgttctgcagcctccgctgctgatacccaggcagagtctggagtgggcctccagcaaactccaacagacctgcagctgagggtcctgactgttagaaggaaaactaacaaacaaaaaggacatccataccaaaaccccatgtgtacgtcaccatcatcaaagaccaaagatagatgaaaccataaagattggggaaaaaacagagcaaaaaagctgaaaattctaaaaatcagagcacctctccccccccaaaggaacgcagctcctcaccagcaacggaacaaagctggacggagaatgactttgacgagttgagagaagaaggcttcagacgatcaaacctctccgagctaaaggaggaagttcgaacgcatcgcaaaggagctaaaaaccttgaaaaaagattagacgaatggctaactagaataaccagtgtagagaactcctcaaatgacctgatggagctgaaaaccatggcacgagaactacgtgacgaatgcacaagcctcagtagccaattcaatcaactggaagaaagggtatcagtgatcaaagatcaaatgaatgaaatgaagcgagaagaaaagtttagagaaaaaagagtaaaaagaaacaaacaaagcctccaagaaatatgggactatgtgaaaagaccaaatctacgtttgtttggtgtacctgaaagtgacagggagaatggaaccaagttggaaaacactctgcaggatactatccaggagaacttccccaacctagcaaggcaggccaacattcaaattcaggaaatacagagaatgccacaaagatactcctcgagaagagcaactccaagacacataattgtcagattcaccaaagttgaaatgaaagaaaaaatgttcagagagaaaggttaggttacccacaaagggaagcccatcagactaacagctgatctctcggcagaaactctatgagccagaagagagtgggggccaatattcaacattcttaaagaaaagaattttcaactcagaatttcatatccagccaaactaagcttcataagtgaaggagaaataaaatcctttacagacaagcaaatgctgagagattttgtcaccaccacgcctgccctacaagagctcctgaaagaagcactaaacatggaaaggaacaaccggtaccagccactgaaaaaacatgccaaattgtaaagaccatcaaggctaggaagaaactgcatcaattaatgagcaaagtaaccagctaacatcataatgacaggatcaaattcacacataacaatattaaccttaaatgtaaatgggctaaatgctccaattaaaagacacagaatggcaaattggataaagagtcaagacccatcagtgtgctgtattcaggagacccatgtcatgtgcagagacacacataagctcaaaataaagggatggaggaagatctaccaagcaaatggaaaacaacaaaaggcaggggttgcaatcctagtctctgataaaacagactttaaaccaacaaagatcaaaagagacaaagaaggccattacataatggtaaagggatcaattcaattcaacaagaagagctaactatcctaaatatatatgcacccaatacaggagcacccagattcataaaccaagtccttagagacctacaaagagacttagactcccacgcaataataatgggagactttaacaccccactgtcaacattagacagatcaacgagacaaagttaacaaggatatccaggaattgaactcagctctgcaccaagcagacctaacagacatctacggaactctccaccccaaatcaacagaatatacattcttctgagcaccacatcgcacttattccaacactgaccacatagttggaagtaaagcactcctcagcaaatgtaaaagaacagaaattataacaaactgtctctcagaccacagtgcaatcaaactagaactcagcattaggaaactcacccaaaactgctcaaccacatggaaactgaacaacctgctcctgaatgactactgggtacataacgaaatgaaggcagaaataaagatgttctttgaaaccaacgagaacaaagacacagcataccagaatctctgggacacatttaaagcagtgtgtagagggaaatttatagcactaaatgcccacaagagaaagcagaaaatatctaaaattgacaccctaacatcacaattaaaagaactagagaagcaagagcaaacatattcaaaagctagcagaaggcaagaaataactgagatcagagcagaactgaaggagatagagacacaaaaaagccttcaaaaaatcaatgaatccaggagctggttttttgaaaagatcaataaaactgatagaccgctagcaagactaataaagaagaaaagagagaagaatcaaatagatgcaataaaaaatgataaaggggatatcaccactgatcccacagaaatacaaactaccatcaaagaatactataaacacctctatgcaaataaactagaaaatctagaagacatggataaattcctggacacacacaccctcccaagactaaacgaggaagaagttcaatctctgaatagaccaataacaggctctgaaattgaggcaataattaatagcctaccaaccaaataaaaagtccaggaccagatggattcacagccaaattctaccagaggtacaaggaggagctgttaccattccttctgaaactattccaatcaatagaaaaagagggaatcctccctaactcattttatgaggccagcatcatcctgataccaaagcctggcagacacacaacaaaaaaagagaattttagaccaatatccctgatgaacatcgatgcaaaaatcctcagtaaaatactggcaaaccaaatccagcagcacttcaaaaaacttatcaagtgggcttcatctctgggatgcaaggctagttcaacattcgcaaataaataaacgtaatccagcatataaacagaaccaaagactaaaaccacatggttatctcaatagatgcagaaaaggcctgtgacaaaattcaacaacgcttcatgctaaaaaactctcaataaattaggtattgatgggatgtatctcaaaataataagagctatttatgacaaacccacagccaatatcatactgaatgggcaaaaactggaagcattccctttgaaaactggcacaagacagggatgccctctctcaccacttctgttcaacatagtgttggaagttctggccagggcaatcaggcaggagaaagaaataaagggtattcaattaggaaaagaggaagtcaaattgtacctgtttgcagatgacatgattgtatatttagaaaaccccgtcgtctcagcccaaaatctccttaagctgatagggaacttcagcaaagtctcaggatacaaaatcaatgtgcaaaaatcgcaagcattcttatacaccaataacagacaaacagagagccaaatcatgagtgaactcccattcacaattgcttcaaagagaataaaatacctaggaatccaacttacaagggatgtgaaggacctcttcaaagagaactacaaaccactgctcaatgaaataaaagaggacacaaacaaacggaagaacattccacgctcatggataggaagaatcactatcgtgaaaacggccatcctgtccaaggcaatttatagattcaatgccatccccatcaagctatcaatgactttcttcacagaattggaaaaaactactttaaagttcatatggaaccaaaaaagagcccgcattgccaagtcactcataagccaaaggaacaaagctggaggcatcacgctacctgacttcaaactatacaaaacagcacagtactggtaccaaaacagagatacagaccaatggaacagaacagagccctcagaaataataccacacatctacaaccatctgatctttgacaaacatgacaaaaacaagaaatggggaaaggattccctatttaataaatggtgctgggaaaactgcctagccatatgtagaaagctgaaactggatccattcctcacatcttatacaaaaattaattccagatggattaaagacttaaatgttagatctaaaaccataaaaaccccagaagaaaacctaggcaataccattcaggatataggaatgtgcaaggacttcatgtctaaaacaccaaaagcaatggcaacaaaagccaaaattgacagatgggatctaattaaactaaagagcttctgcacagcaaaagaaactaccatcagagtgaacaggcaacctacagaacgggaaaaaattttgcaatctacccatctgacaaagggctaatatccagaatctacaaagaactcaaacaaatttacaagaaaaaaacaaacccaatcaaaaagtgggcgaaggatatgagcagacacttctcaaaagaagacatttatgcagccaacagacacatgaaaaaatgctcatcatcactggccatcagagaaatgcaaatcaaaaccacagtgagaaaccatctcacaccagttagaatggcaatcattaaaatgtcaggaaacaacaggtgctggagaggatgtggagaaataggaacacttttacactgttggtgggactgtaaactagttcaaccattgtggaaggcggtgtggcgattcctcaaggatctagaactagaaataccatttgacccagcaatcccattactgggtatatacccaaaggattataaatcatgctgctataaaaacacatgcacacgtatgtttattgtggcactattcacaatagcaaagacttggaaccaacctaaatgttcatcaatgatagactagattaagaaaatgtggcacatatacaccatggaatactatacagccataaaaaaggatgaattcatgtcctttgtagggacatggatgaaactgggaaccatcattctcagcaaactatctcaaggacaaaaaaccaaacaccgcatgttctcactcataggtgagaactgaacaatgagaacgcttggacacaggaaggggaacatcacacacttgggcctgttgtggggtgggggaagtagggagggatagcattaggagatatacctaatgtaaatgatgagcacagcacaccaacatggcacatgtgtacatatgtaacaaacctgaatgttgtgcacatgtaccctagagcttaaaagtatttaaaaaaaaaaaaaagatataaaattagccaggcatggtggcgtatgcctgcaatcccagctactcaggaggctgaggcaggagaatcgcttgaacctgggaggcggaggttgcagtgagccaagatcgtgccaatgcactccagcctgggcaacaagagcgaaactccgtctcagaaaaaataaataaatacaaagaaatccagcatagtagagatcaagaaaataggtaacatactgtgtttgtggacaaagaggatatgagcaaataggaatactcatattgctaaaggtgtataaaatgatacaacatcaatgcagaacaatctggcattggaattataagtgcagattaacttgaaccatacatgaatccatcttatagctatatatgcatctgtgagaaatgctattcatataaaattattcattgcagtactgtctgtactagcaaaagaccggtaaccatcttttgtccacaagtagagaactacatgaactatgacatgtctattcaatggatacacaaagattaaagctcttatttttctatctatccatccatttatgtatttactttttctgatagccttgctatagtataaagaagttctttttgtttttttggtttttttgagacagagtttcgcttttgttgcccaggctggagtgcagcggtgtgatctcagatgactgcaatctccgcgtcccgggttcaagtgattctcctgcctcagccttccgatttgctgggattacaggcatgtgccaccaagcctggctaattttgtatttttaatagagacagggtttctccatgttggtcaggctggtctcgaactcccatcctcagatgatccgcctgcttcggcttcccaaagtgctgagattataggcgtgagccaccatgcccagccagtataaagaagttctttatgtagtaatataaaataagctacaaaagctattgttaagttaaaaaagtaaggtacagaataatgtgtaaaacaaaaaatagacaaatatgtatttgcacataaatagaataattttggaaagttccacaagaaacttgttgcagtgattgtttttggagacagaaattagttggatgaaactacttattatcactcttctttttgtatcttttgctatttctccccattaaactatttaaaaacaaacaaaaaattaattacaaaatataatgtcccaataaaatatatccacaatttaaaaatatacaatttattaaagcatattttaataaatattataaatagacattaatatttgtggcttccttatagtcacaagtgtccagaatgcccactaccaatgccaatgtattatttgtattaaggaataacagcattgcataattttgtattgctgctactgtatactttttacttggtcactgcatgctaaatttctctatgtactgacctttggttttcagtgttttgaggaggacatatagctggggtttcagataatacatttttaagattttcttctttcacttcctcagttttattagtttgagaatttcttttctggaaataggatgctgcagatgcctataaaaacaaacatgaatactgcaataacatctagtataattttatatgttttataagcacgttctgaaaaatgtgaagaaacatctataattattgagaattcttatactaacatgtgaaatctggagttctcagttgtaaataaataggcaaacacatgcaaaaccaaaaaactacacttcagattccatgttttccttttttttttttttttttttgagacggagtctcactctgttgcccaggctggagtgcagtggcgctatctcggctcactgcaacctccaccctccgagttcaagtggttctcctgactcaccctcccaggtagctgggattacaggcacctgccaccgcggctggcctaaattccatgttttctaaatgaatacaattatattaaatagaaaagataagcaatagatctattttaccaatgactaatccgggatcaaatacttatcagagtggaaaaatcaggactcagaacaaggaaaaattagggccatgtacaatatcagccactattaaatacgaatatacatcagaactatctgggtgattttaataaaaatacagataaatgtctgagcttctggggtctgagtatatatatttttaaaaagtgatctgtaaaaacaaggagaggggcaggataggctgggtgcggtggctcatgcctgtaataccagcactttgggaggctgaggtgggtggatcacttgaggccaggagtttgagaccagcctggccatcatgctgaaaccccatctctactaaaaataccaaaattagctgggcgtgatgtcaggcctctgtaatcccaactcctcgggaggctgaggcatgagaattgcttgaacccaggagacagaggctgcagtgagctgagatcctgacactgcactccatccagcctgggtgacagagtgagcctctgtctcaaaaaagacagggggagcaggatagtgatcttggaagtcagaatctgctacaaagtgtgtaacaactcacgaggcagaatagggagtgattctgaaacaaaaaacacaactgttttggggtttgtttttttcagatggggtatctcttatgtttcccagactggactcaaactcctgggctcaagtgatcctcccacctcagcctcctgagtatctgggactacaggtatgtgccactgtgcctagctgcaaaaacagaattgaacccacttccctagcaagacaattgtaaacaatcagaacctcctatcctatatctgaaacagtgaacaaaactgaagacaaacagatcccatgctgcttactgcagatgagggtagctgaaacagtacctgcttaggcttcggctttggaatcagaggctttataatgggagacttttcattatttgtagttcgactaagtgcagtggatttcttggatgatttgcccatattgtctaaaatattagttgaacgtgctgaattcattgacatggctggttctttggaactggctgatacctaaagagcaaactagtgttagcactgtatgtttaaagaagaaaaataaaatcccaagagacttattttttcttgaaatttctgttaagtttgtattgccatctcatctttagaactaaatacatttggtacaatccaaattaagaatgatacgtatattcccaaataccacatccccaagaaagacagaggtatctttcaaaaccataggtacttagaaggtaagtagaaaagacaactctcagcccaagtgctgctttcttctgtttccacacagatcagtctttcatgcctccaagtctggggagagtcatctcatcatttggaaatatttctttgtatacaaatgtatttaaataatataaaacatcacttggaagagtttaccttaaagggatttactcgtccttggctgctaaaggtaactgcacctttcacaaaaaagaaacccttgcttaataatggtagaaaatagatgacttctgacatctataatactagacagagtattttaatccccattaaatgaaaacaaatgtattttgcaacttttcaaaactattaacaacagatatcctctttcctacttctaagccaaaataaaagctattaaatgtgaaccaccccaacgtgccactatgaaacatattcagtatgtacagatcttttatcttctgttactgcggaagagtggcagctcgtctgagctaaggttagtaatccctttacttgtgttctgcatcccatgccctcctgctttgtcagaaaacctgacctatcaagtttcttgacatcctacatctttgacttttccctatttattggcccctaaagtctcccaacttaaaaagaaacaaaaaacaaaccttctctaccccacattccttccagtcaccattttctctcgcctcctccatccagccatttttttttttttttgagacagagtctcgctcttgttgcccaagctggagggcaatggtgtgatctcggctcactgcaaagtccacctcccaggttcaggcgattctactgtctcagcctcccgaattgctgggattacaggcgcctgctaccacgcccggctaatttttgtatttttaatagagacagggtttcaccatgttggccaggctggtcttgaactcctgacctcaggtgatccgtctgccttggcctcccacagtgctgggattacaagcatgagccaccacgcccggtcatccagccaaatttttccaagaactgttgacactattatcatttcctcaccacccatacattcctccatacaatatagcacttccagctctaccaccctacagaatctcctcttgctaaggccctcagtgatctctacattgtcaaatctggtggatacctttcagtcaccttgtttgctctatcaatggcatcccacatagctgactgttccttacttcttgatactttgtcctctcttgacttctgagatactgcattccctgacttagttccttcctctctggacctgtggactcattgtgttccaatagttggttcctcctcttcctctacctgatgctcaaatgttggagattccctaggcttaagctcatttttctttttgctttacattctcccccaatgcttgcttacccatgctcatggtttaaattgctatacttatgccaatgattttcactttgtatctcttgaccagaatacttccctgagctcctgattcaaatatctgtcttcacgacattctactcaccttacagtaattcatcatcttcctctctaaatctgcttttctctagtgtttcctgacttaggaaatggcaccatcattcactcaagtactcaagccagtgttaacaaactaatctctaattaagagctttcctggcatggtggcttaagcctgtaatcccagcactttgggaggctgaggagggaggactgcttgagcccagtttaagactagcatgggtaacatagggagaccctgtctctacaaaaacaaaaaacaacaaaacaaaaaacccaaaccaaaacaaaactagccagacatggtgacacatgcctgtggtcctagttacttgggaggctgaggtggaaagatcgcttgggtctggggggttgaggctgcagtgagccataatcacgccactgcactctaacctggatgacagtcacaccctggcggggggaagaggagggagggagggagggaagaaggaagggagggagggaggcaggcaggcaggcaggcaggcaggcaggaaatttctagctgagcatggccacttgtgcctgtaatccgaaaattttgggaggctaaggcaggagggtcacttaagcccaggagttccagaccagcttcggcaacaaagcaagctcctctctctacaaaaagtacacacaaaaaattaaccaggcatggtgatgcacaactgtagtcatagctactcagtagggtgaggcaggaggatcacctgagcatacgagttcaaggctgtagcgagctaggactgcatcactgcactccaactctgctccagtctgagtgacaaagcaagataccctgtatccgcaccccccccaccaaacaaaaaaaacaaacaaaaaaacctttccatctagccaataaaaattgttttatttatctcgtttctgaaaatactttataaaagtttccccttttgtctctcctggcagagtgctagccccttgcggtttggtgcctccctgattcatgaatcactgaatgttcaaattaatccttcaagattcaaatgtgcttaagtttttcttctattacaagaaactgagaatcactctttacgccctgaactcctacactctcttcatcatcttcagaaatagctctccaactctgcccattctttctaacatcaccatcaccaccctagctcaggcccttattcaatctcatttggactgcctctgtagtttgtttgtttatttatttatttgagatggagtctcgctctgtcgcccaggctggagtgcggtggtatgatctcacctcactgcaagctctgcctcccgggttcacgccattctcctgcctcagcctcccaagtagctgggattacaggtgcctgtcaccatgcccggctaatttttatgtatttttagtagagacggggtttcactgtgttcttcaggatgctctcaatctcctgacctcgtgatccaccctcctcagcctcccaaagtgctgggattacaggtgtgagccaccacgcccagcttgtagtctctttattttttaatttttatttacttcttcttattattattttagatgaagtctcactctgtcacctaggctggagtgcagtggcgtgatctccacttactgcaactccccactcctggattcaagcaattctcctgcctcagcctcccgagtagctgggattacaggcatgagccaccatgcccggctaatttttttttttgtatttttagtggagatgtggtttcaccattttggccaggctggtcttgaactcctgacctcaagtgctccacctgcctcggcctcccaaagtgctggaattacaggcgtgagccaccacgcctggcctatttattttttgatacagggtcttgctctgtcacccaggctggagtgcagtggtgcaaccatagcctactgcaccctcgaactcctgggctcaagatatcctcctgtcccagcctcccaaatacctgggactaccggtgtgtactaccatgcctggctaatatttttattatttactttttgtagagatagggtttcattgtttccaaggctggtctcaaacgtctggtctcaagtgatccttccaccttggcctctcaaaatgctgaggttacagacatgagccatcacacctggccagtagtctattatctgttcttcttcagcacagtgtgccatgctatacctctgcttaaaacctacaacagtctctcagtgaccttagaataaagagcaaaatcctgaccgggtgtggtggctcacacctgcaggtccaacaactttgggatgtggaggtgaggaaattgcttgagtttgagaccagcctggacaacagagtgacaccccatctctattaaaaaaaataaaataaaataaaaaaaagaccaaaatccttaatatggcctacacagatctgcatgacttggctcctgcccatcactccgaaacccttcagcaccactttctctttgctctctgagcttttcacaccacccttttgcagccttcagttcacacatactgttccttaagcccaaatgcttctcttctgctcctgttcccatgcacctttgccttgctgactgttattcatccttcaggtctctgctgtaaacactccatgaggcctgccttgaagtccctacccatcctccaccactggctagatgacagctatgtgtcatacgctcttttcatattctacatgttttttaagttaatttttttaaatcaaagtaacatatgtccacagtttaaaaagtcaaatggtactataaggtttatgctccccaccaaaaaagggccagcagtgccttacttcaaccttctcttatcccccaggcccactccctgtacgcaaccattttcaactccttttttttttttttgagatggagtctcactccattgcccaggctggagtgcaatggcacgatctcggctcactgctacctccacctcctgagttcaagtgattctcctgcttcagcctcccgagtagctgggattacaggcacataccaccaccctcagctaatttttgtatttttagtagagatggggtttcaccgtgttggccaggctagtctagaactcctgacctcgttatccgcccactccggcctcccaaagtgctgggattacaggcgtgagccactgcgcccagccttcaattccttttaactgtttctccagtatcctgcatgcttcctcagtgatacccagatctgtcttcaacatctgtcttctcagctgggctaaaatagcattaaaacagagatcaaccacacatgtctgtttgacttctgtatccaccattaagtaaaatgcctgacactcaataggcattttataaacatctgttaaatgaccatagcttcacaaacaacatctgagattaaaaaaacaaaaacataaacacacacacaccaaaagtggccttaagagttaaggtgtatttgcgtagatgtgtcactttgcagatgacttgcaaaatttccttgatattacaaatttataaatatttctcacctgacttagctgaaacatcagaggaatttgtacttttggaaaacgagttctgtcctacagattaaaataaagcaatataatgtaaatggggaaaatatagtcatcctcaatatacaacaaccagatagcaaagaggtctgaaaaaaagtatgagtattcaatttccctcagttaagcaaaatgggaaaagccacatccatgatagttctcatgatttatgggcttgaaaatgtatctcaccaggcttatgtatttctggtttttcttcatcatcagcttctccactgtcctcagcatcttcttcaacttgatttctgaaccttggttggctccactctgtagcagtattgctgtaactaagagaaaataatattattcaataaagagctatgcaaagaccaacttaacattcaagacagtaaaggaaaattcaaacaactaaattatttcttacccagcattcagcttttttctgaaatcttcttcttcttcttcctcttccacctgggttgctgtcaattcggctgccttctctacagccagttcacttagtttttgagccagtattaatttccgagagcgagaagcatatttaatggctaaattcacagcattttgagtcattagatcagcaagttccacacaacggaattctcgctccagtttacaagaaagctaatccaaaaaggggggggggggggagatcaaataacatcaagtaaaactttttaaagatactgacactactagtaaaactgagacaatagttttctagctactctatctccctaattctaagatgcacatttttacaagttttaacatctctgaaattggaattacaattaattacaattaatggtgggtcagtttggcagcatttttatgtctccatggcttaaatgaataaagtaatggtgcactatgcaataaacagtggcttagatttgatgaaatattacataccactttaatctactaattgcaagaaaattaagaaatttgtttaaaaaattcaagggggaggctgggcacggtggctcacgcctgtaataccagtgctttgggaggcccagatgggtggatcatgaggtgaggagttcgagatcagcctggccaatatggcaaaaccccgtctctactaaaaacacaattagccaggcgtggtggcgtgcgcctgtaatcccagctactcgggaagctgaggcaggagaatcgcttgaacccgggaggtggaggttgcagtgagccaagattgcaccactgcactccagcctgggcgagaaagcgagactctgtctcaaaaaaaaaaaaaaaaaaaaaaatcaagggggccaggtgtgctggctcacacctgtaatcctagcactttggaaggccaaggcagagggactgctagaggccaggagtttgagactaacctgggcaacacagtgagaccctataactacaaaaaataaattagctgggcgtggtggcatgcacctgcagtcttatctactcaggagcctgagacaggaggttcactagagcccaggaggttgaggctgcagtgagttacaatcttgccactgtactctagcctgggtaacagagtgagaccctttctctaaaaaatacaaaaaagaaaaacaacaaactgagaaaagttggtattttgaagattactaagggtctcctaattcatagtgtattagaactattttcttacttagatattccatgtctgatccatcagcacaaaagctttagatattcacctggatgcccttttcaagatttttagtatcatttatctataatcagtacttcttaatcgggatggtacactgcctcagggggcatttagaaataaaaaggaagccgggcgcagtggctcacacctgtaatcctagcactttgggagactgagacaggtggatcacaaggtcaggagatcgagaccatactggctaacacggtgaaacacagtctctattaaaaatacaaaaaattagctggtgtggtggcagacaactgtagtcccagctactcgggaggctgaggcaggagaatggcgtgaacctgggaggcggagcttgcagtgagcagagatcgcgccactgcactccagcctgggcaacagagcgagacttcgtttcaaaaaaaaaaaaagaaataaaaaggaatagtctggtttccacagtgactattctgaactaaaggcatttgcccgggggtcaggaatgctaaagaagaactcaacaatccccttgaactcctgggctcaagatatcctcctgccctggcatctttgatatgagtcccctggtatttttgatatgagaaacactgccacagggaaaagctcctctaggctaaatagcaaatacatgaaatatgtttccttatatgtgttgtacaaataaaaaggctactagttcctggaccacaagtaacactttataaaaggaataaaactttttctacaataaactgagttttcttaataccaaacttaaggccatgttgcataaaggtgacagtagtgagtactaccttttggagacaagagtggcaatttgctctgtggtctcatataccacttttctctaagaaccttttttctccaattttaaaattaaaagtctggaccattcactcttgtcaacaaatatcgaggtctactatgtgttaagccaccatgtcagtgcctggcatacagcagtgagcaggtctctgccctctggggcataaagtctagtgtaagacaaataaagaagaaatgatactatactcctctccataaaccaaccttgagtggggacacaagcacaggaactttaagacaccctgctccaaagataaatgtacttaaatattctagacaccaaacctggccactggtcacaaataaattttcatcacacacagctgcctaactcaaagaggatgacaaaaggcaggcatatctaacagcccgatcaaagttcttaagattgcccagccctggagattaaaaaacagtatatactcaaactttgtaaaataataacagaaactagagcagtggttctcagttaccttgagagcccgttaaaacatagactgatgggcaaaagcaaaagggaagtagccctagagatgtttattcctgcacatgatcttagctacaaggtactgttttatttattttaggctgggcacggtggctcatgcctgtgatcccagcactttcggaggccgaggcaggtgaattacctgaggtcaggagttcaagaccagcctgaccaatgtggtgaaaccctgtttctactaaaaatacaaaaattagccaggcatggtggcacacgcctgtagtcccagctactcggaaggttgaggcaggagaatcacttgaacccgggaagtggaggttgcagtaagccaagactgcacaactgcacttcagcctgagaaacaagagcgaaactccgcctaaaaaaaaaaaaagaaaaaaattttaactgcaagaccaactagaagatagaactttacaagggaaaacaccaccagataaaacttaagaatggctgggtgtggtggctcacacctgtaatcccagcactttgggaggctgaggcgggcggatcacgaggtcaggagttcgagaccagtcgggccaacatagggaaaccccatctctactaaaaaaaaaaaaaaaaaaaaaaaattagctaggcgtggtggtgtgtgcctgtaatcctagctactcgggaggctgaggcagaattgcgtgaacccgggaggcagaggttgcagtgagccgagatcgcaccactgcactccagcctgggtgacagaacgagactccgtcgcacaaaaaacaacaacaacaacaaaaaaaaacttaagaatcttaggttgtgggacttagtcctaatgcacagacctttaagaaattcaacctatagaaaagcatttaactttaacgttttcagtatatttattttactcaccgcaagcattttcattaaaagttcctgttgctcttttgttgcttgatttttagtgctctcttcatattcataaccatttttagctaaataatcaaggtggttgtgaaatataactgaacgccaaaattgctcctataaaagcaaataaaattgcttaaggccaactatcaccttaatatgaggcaagcgttaaatatttatcttaagataccagtttttgaataaaatatgttctgaactcttcctttctataagtttattttacaatttaaattctagtgtgatactacagcttaactttttcccctatccttaaaaaaggcagctggggaggaatacagcatttaaaacagtttcctagctatcataattaatgctcagagaatttggtaaacaagatttttaaaagctaacttgtttcttatttagaataactaactgcaagatttcaaatgacttttgatgacacaaggctaggactagggtcaggcaagccaggtgttatggcacaaaatgtatggaggcacttcttctcagggacatgccccatcctgagagtaagtctttccccagtgggtctctgacagtcacacccatttactttgtagacaaagtccctggaagcagtgatggcaatcaggtggcctggtgatcccaagcagtcctcttccctccctgctacccctatttatgtaattatacagtaatgaatattcaatactggccatcaggataattttaaagtgtgtgtatcacaggtgctgtattatcaaattcaaagtgtcaaggtaagacttccacatacctccatttgtcctttctctgttgcaatctgacagtaaggaagcttaaaggataatatagcaacagcagggcgtggaagggttgggggaaaccgagaacctttacaaggaatgcacctgttagtaaagaaaagttccatcataaaaatttactaacatgtcataaaaactacaaaatttaaaaagttttcaaaagttagtaacttagaatagtaatattataatagctgccttaatcatatataacaaatatctctttttaaaaaagtgttttaggcttgactaggcataaagactatccctacatgcatttcaagaatagaaaaattccttctcacatctcacttgatttattttttttgagacagggtctcactgtgttgcccaggctaaagcacggtggtgtgatcacggctcactgaagccccaacctcccaagttcaagcaatcctcccacctcagcctcccaagtagctgggactacagatatatgccaccatgcctggctaacttttgtattttcagtagcgatggggttttgccatgttgcccaggctggactcgaactcctgggctaaagtgtgcctcccacctttgcctcccaaagtgttgggattacaggcgtgagctaccctgcccaacctcacatctcactttattaaatgacaaccactaaaagtgaaatcagctctcttcatattttccttagcaaactaccacttttaaaacataaaaattgtaccattaatacctgtcatggaatccatgttatcaccaagataaatgctgatgaagctgcacatggaacatactctaaggtcaaccacatgcttggccgtaaagcaagtctcaaaaattttttttaaattgaaatcataccaagcatatattctgagaccatagtaaaataaaaatagaaatcaatactgaggatctctcagaaccacacaaattacatggaaagtaaacaacatactccagaatgacttttgaataaacaatgaaattaagcagaaattgaaatattctttgaaataaatgaaaacagacacaacatatcaaaatatatgggatgcagcaaaagcaatgttaagaggaacgtttatagcactaaacacctatatcaagttagaaagatctcaaattaacaatctaacattgcatctagggaaactagataaacgagaacacactaaccccaaagctagcagaagaaaagaaataactaaaataacagcagaactaaacaaaattgagactaaagaatccatacaaaggatcaataaaacaaaaaaaattgattttttgaaaggataaacaagatcgataaactcctagctagattaacaaagaaaagaagagggaagctccatataagcacaatcagaaaatggcaaaggtgacactacaactgattccacagaaatacaaaagatcctcagagactattatgaacacttctatgtgcacaaaccagaaaatttagaggaaatgggctcacacctgtaatcccaatacttttggaggcaaaggtgggagaatcacttgaggtcagaagtttgacaccaccctgggcaacaaaatgagacccaattgctacaaaaatttttaaagattagccaggtgtggtggtgtgtatctgtagctccagctgctcagaagactgagatgggaagattaattgagcttgggaggttgaggctgcagtgagccatgatcatgccactgcactccagcctaggtaagaccttgtttctatttatttatttatttatttttgagacggagtctcgctttgttgcccaggctggagtgcagtggcacgatctcggctcactgcaagctccgccttccaggttcacgcaattctcctgcctcagcctcccaagtagctgagactacaggtgcccaccaccacgcccagctaatgttttgtatttttagtagagacggggtttcaccgtggtctcgatctcctgaccttgtgatccgcccgcctatgcctcccaaagtgctgggattacaggcgtgagccaccgcgcccagcattaagactccgtttcaagaaaaaaaaaaaaaaaagagagagagaaagagaaagtcctcaaaagcaattgcaacaaaaaccaaaactgacaagtgggacctaattagactaaagaacttctgcacagcaaagaaaatctagaggaaatggataaattcctggaaacataaaacttcccaagactgactcagaaaaaacagaaattctgaacaaaccaataatgagttccaaaattgaatcgtaataaataaaaaacctatcaaccaaaaaaagccctggaccagaaaaatcacagctgaattctagatgcacaaagaactggtaccagtcctactgaaaatattccaaaataccaactcctctccaaatcactctataaagccagcattatcctgataccaaaatctggcaaagacacatcaaaaagagaaactacaggccaatatccttgatgaacacagatataaaaatcctcaacaaaacactagcaaaccaaacccaacagtactttaggaagttaatacaccacaaccagtaggttttactcctgggatgtaaggttggttcaacatatgcaaatcaatatatgcaattcactgcatcaacagaattaaaaacaaaaaccacatgatcatctcaatagatgcagaaaaagctttcgataaaattcaacatcctttcataataaagacctccaacatactaggcattgaaggaacataactcaaaataaaaagagccatctatggcaaacccacagacaacaccatatgaatgggaaaaagctggaagcattacccttaagaattggaataagacaaggttggccactcttttcactcatatttaacagagtactgaaaatcttagccagaacaatcaagtaagataccaaaataggaaaagaagtcaaatatctctccactgactatattactctatacatagaattgctaaagggctcctagataaaagactttggtaaagtttcaggatacaaaatcaatatacaaaaatcagtagcatttttatacaccaataatgttcgagctgagagtcaaatcaagtatgcaatcccatttacaatagtcatacatgtacataaaatacctaggaatatatctaaccaaggaggtgaaagatctctacaagaactacaaaacactgttgaaagaaatcacagataacacaaacaaatggaaacacattccacactcatggattagaagaatcaatatcattaaaatgaccatactgtgtctgcagcaaccttggtttgcatcgaagtcacagcaccaaaaaaaaaaaaaaagaaagaaagaagaaagaaaaagaccatactccccaaagcaatctatagattcaacactattcctatcaaattaccaatgtcatttttcacagaattagaaaaaactattctaaaattcatatggaaccaaaaaagagcccaaatagccaaaggatctaaaacaaaaacaacaaagctggaggcatcacattacccaacatcaaactctacttcaaggctagtgaaaaagaacatggcactggtgcacaaacagaaacacagaccagtggaacacaatagggaacacagaaataaagccacacacctacaaccaactgatctttgagaaagctgacaaaaacaaggaactgggaaaggaatccctactcaataaatggtgctgagataactggctaaccacatgcagaatgaaactggacccttaactatcaccatgtgcaaaaattaactcaagatggattaaacacttaaatgtaagacctcagaatataaaaatcccagaagaaaccctagcaaatacccttcaggatattggccttggtaaatatttcatgactaagtccacaaaagcaattgcaacaaaaacaaaaattgacaagtgggacctaattaaaccaaagagcttctgcgcagcaaaagaaactaccaagagtaaacaggtcaggtgcaatggctcacatctgtaatcccagcactttgggaggccaaggcaggaggattacttgagcccaggagtttgagaccagcctgggcaacaaagggagacctgtctctacaaaaaaatttaaaaattatccaggtgtggtggcatgtgcctgtagtcttgtgcaatcccatttacaatagccatatgcacacacacaaaatacctaggatatatctaaccaaggaggtgaaagatctctacaagaactacaaaacactgttgaaagaaaccatagatgacacaaacaaatggaaagacatttgcagatcctgaggtggatcactgagcccagaaagtcgaggctgcagtgagccatgatctcatctcaccaccgcactgtagcctgggtgacagaatgagactctgcctcaaaaaaaaaaaaaaaaaaaaaaaagacatcccacagaatgcaagaaaatgttcgcaagctatgcatccaacaaagatctgatatccagagtctataaggaacttaaaaaaaaatcagcagcaaaaaacaaatatccccaataaaaagtgggcaaaggacatgaacagacacttttcaaaagaagacatacaaggctgggaacggtgggtcacacccataatcccagaactttgggaggctgaggtgggtggatcacttgaaaccagtagtttcagaccagcctgggcaacatggcaagacatgtaatcccagcactttgggaggccgaggcgggtggatcacgaggtcaggaaatcgagaccatcctggctaacacagtgaaaccctgtctctactaaaaatattttaaaaaattagccaggcgtggtgatgggcgcctgtagtcccagctactcaggaggctgaggcaggagaatggggtgaacccgggaggcggagcttgcggtgagccgagatcacaccactgcactccagcctgggagacagagtgagactcggtctcaccaaaaaaaaaaaaaaaagttggccagatatggtggctcatgtctgtaatcccagcactttgaggggtgaggcaggcagatcacttgaggccaggagctcgagaccagcctggccaatgtggtgaaaacccatctctactaaaaatacaaaaattagctgggtgtggtggtgaacgcctgtaatcccagctactcgggagggtaaagcacgagaatctcttgaacctgggaaattgcactactgcactccagcctgggcaataaagcaagactgtcacaaaaaaaaaaaaaaaaaaaaaaaaaaaaaaaaaaaaatgccaatgaggcatattcactttcatccatcagtttgggaattcttagtactgtcggtatgagttgtcaaaaaagagaaaaaaatcaggcatggtagtgggcacttgtaatcccagatattcaggaggctgagacagaagggtatcacttaagccaggagaccagcctgggcaacatagcaagactccattccaaaaaagagagacagaaagatggtgaaatgcctaatataggttaagtgtttattagatattggtcagagtgaagcagaacatcattagaaagactataatctatatctactctgataaatatggtaacaggtcaacggggcaaagactgtctaaacctgttctgagtagtctatataaggcattcaaacacgcccatcatgagtagtgctctcgcagctgatttattaaaaagcattaattaatcacagaatgatttatatatatatagaactctttcaacttatgtactccgatttatttattagaaaagcactggaaaaccatgactgcacactataaataccacaggcaaatttcatattttcataaagtcatttaaaaagacgaaatctctttttgaatgcttactaataatcatccacttaatttatagtatagccttttaatcaggacattcttgaagggagatactaagtagaagctagaccctagggtttaaaaattttataaatatcttccagtattatcaaatgcccactagagtaattagaaaacaagtaagtgacaatgtctagtattctttttcaaactactcaggcccctttcttgtgagattcaaataccctcccttcttttttttctgactatacaataaaaatacaaatgtttttagggttctaatttttttgaacatacaatttcatttatttcttccttctctccttttatgattttataaaaaatctagttttcaccacacagtatgaggtggcagtgtgaatacctcaagtttgaaagaatcttgtggcaattctgtcataaatctctatttacaagaatcactactttactagtcatgcaaaatgaaaaagagcatgtgcattcacaaaagatgagtccaggtacatatatatgtacattaacaaaattagaagaaacactgtgagaaatgttaattgcctaaacatttttttctaaaatgtcctgtttaaaaacattttacagctcactttattgatttacacatagtaagcaattatcacaaagaaaaaggaaatactgagtaggattttattaagttactttctaagccacatttacatcaaagcagagcaccaattcgcatttttttatcctttccttagctttagagacttcaactaaaaagatgttttctctgttaaatatccccgtcatagaagaattcaaggaaaaaacaaacacatttaaactgctaatttggtgggttttgatgacgacggagtttcctggaaactatgtgcataaaccacctggaagaggaatttaaaaaaaaaaaaacaatgaaaaacctggtttactaaaaagacaaaagtggctgggcacagtggctcatgcctgtaatcccagtacataaggaggctgaggtaggcagatcgcttgagctcaggagctcaagaccagctcgggctacatagcaaaacctcgtctctacaaaaaaatacaaaaaatacaaaaaatttgctaggcatggcagcatggacctgtagctttagctactcggaaggcggaggacggaggatcgcttgaggccaggaggcagaagttgcagtgagctgaggtcacgccactgcactccagtctgggcaacagagagagattctgtctcaaaaaaaaaaaaaattacttcaatttgttttcaaattgaccacaaaacctgttttgttttgttttttttttttttgttatattaaagaaagagtttaaaaatgccaaaataatcaggcgtggtggctcactcctgtaatatcccagcactttgggagccaaggccggcagatcacctgagctctggagatcgagaccagcctgggcaacctggcgaaacactgtctctactaaaaatacaaaaaattaactgggcatggtggcacatgcctgtaatctcagctacttgggaggctgaggcataagaatcacttgaacccggaaggaggaggttgcagtgagatgagattgtgccactgtactagcctggatgacagaatgagactctgtctcgaaaaaataaataaaaatgccaaactggagaaaactaggtcgtgtccagattaaccttgccccagccagcaagttttgctttttcttctgtgttggaccggactgtcttctgcatttgaggggactttgctcacatctcttttaaagcacttatttgggagtagcataatgactttacaagcctacctcttccaggccacagcctcatttatctttgtgtggtatagcacatctagtcggtactataataaatgctaattcagtgaacacaactaggaaaaatgtctagttttcaagcacattaaataactcttgttttgaaaaactaaacagaaaaagaaagaaggtctctgttggtagagagcaaattagactgtaacacagcaaaatttattaactctcagttatgtattaaccagtagtgtcatgaaaaaatctttagaagaaacaatacttggtaaactgaagttcagctcaaagggggcagggatgacattaatacagatcagtaatttctcatattcataatttttttttttttgagacagagtttccctctgttgcccaggctggagtacagtggcgcaatctcggctcactgcaacctctacctcccaggttgaagcgattctcttgcctcagcctcccaagtagctgggattacaggcatctgccaccaggcctggctaatttttgtatttttagtagagacagggtttcaccatgttggccaggatagtctcaaactcctgacctcagggtgatctgcctgccttgccctcccaaggtgctgggattacaggcgtgagccactgcacccaacctcatattcataattaaaggaaaataggaaaattttatattgacttaaattaatgcttttttttttaaagagacggggttttgctgttgcccaggctgtctgcaaactcctgggctccagtgatcctcctgcccctgtcttttaagtagctggtattcaggtgtgcaccgatgtgacacgctctcaaatgaatttttaaaaattatttttcacaaaatgtactttcttttaaaggatctctgaacaaaaagaaagcataaataccactgagttgggttagaaaatgcatttaaagttaaaagaataaagaaagaggtatcactaagtcacttcatcttcacagaaattctgtgaaatgggtacactgtggttttagagatgaggaaacagtggcacagagccagggctactgaacgaggatttcagccaggataccacaagcaggcagtgtcactcgagagctcgagctctggaccactaggccacattggctttccagagaagcatgtgatttgctatctttatcacaaacaatgagagcaaacagaggcattaaaaatgcaaataaatatgaagatgaatttctttatttcctttttattttagagacaaagtctccttctgtcacgcaggttggggtgcaggggctgtataaccttgaactcctgggttcaagtcatacccttacctcagcctcccgagcagctgggactacaggcatgtaccaccatgcctggcagggtctctctatgttgcccaggctagcctcaaactcctggcctcaagtgatccccatgctttggcctcccgatgtgttgggattacagctgtgagtcacaaagcctggccaaaaatgaatttcttgctagccaaaataggtaaggctctttaaacacaacagcaggctactaaaaaagtgattgcagaattttattccccgaacttccatgtaccgctatccacagaaaggaaatgaatcatctctaaatatgccaacatgttaagcaaaactggtgtgaaaagtacagtaagccatactgagaagtgttgcttccaatctttgaaaaatatttaaggctatataccaaaaaataaataataaataataaataaataaatgttctacaagggtgtaccaaaaaaaaagaaaaatattcttattcaagtttattattccagcataaagccaggaaaatatgaaaatatgaaaacagtctgcagttatcaatttatcacataatatacaaataaatacatttctatcaacagattttttagtgtatcttctcagtgcttcaaatgcctactgtataagattcccctcagtaattcaattattctacaacaagctggtctttataggagaagtatttattctttcaatctacttatcagctaactccctttgttcctatattttaatacaaaaaaataaggttgttttttttttgccaataaatagatgtgtactctctaccaaattactttaatctttttggaccttagttttctcatatgtaaaaattggggagaagtgctgggggtgaagagagacagcaaatagaccaaaagaacttggtagttcccattcttttattcctgtagggctgctgagctattataaagtgtctaggaatgcacacaagcaccatgaattgtctgtagaccaaatacaaaaatagtttccactttacatactaaaattttcacatgtatgcagataacgtgatttgtaaatacaattttatattaaaataaaattttcaggtctacagaagcttatgttatcatgcctgtaatcccagcactttgggaggccaaggtgggaggatcactcgaggttagttcaagaaaagcctagggaacatagcgagactgtgtctcaataaagaaatattctttattagctgatactaaatgtagagctactagagctactattatttggaggcatgaactgttcaacatttaaaaaaggactcttgttcaagtccagcctggataacgtaaggagaccctgtttctaaataaataaataaaaagggctcttatatttgaaaatgtcaggagctactagtatagacggtttctaaaatccttctaagtgtaaaagctgtaatttacagtccattatttctttatccattattgaatataacagttaaatgttaccagctgtaattatcgtagtttttaacaagttaaaattctttacaaatcttaaataaaaagcaagtaaaaaatgtgttccaaagggttgtgtggaaaaaaaaaaaaagcatgttaagaaaaaaaaagccagctggataaattactaagggtgtgaaaactgcaattgatgaaatacttgtaatattaaatgaaatgaagaagcaaaattgttcattgcagatgactaatttcatatattgcaaataaataatttcatatacctctaagataatgacattcactaacaaaatgaataatcttacttgaataagcattaggcagaatagtaaaaatcctcataggttcaaaccttaacctactattaagatagactgtgaattctttaattcaaattactaaactaactagattcctgaaaatggacatgcaagaaatcactgagaacaacctacactataagaactactaaaaatagtgaatgtggcttggcatctggcttatacctataatcctagcactttggaaggctgatgcaagaggatcagttgaggccaggaattagaggtcaatctgggcaagatggtgagaccccatctttacaaaatatttttaaaaattagccaggtgtggtagcctgtgcctgtagttctacctactcaggagactgaggtgccaggatcacttgagcccaggaattcaaggctgcagtgagctatgactgcactactgcactccagcatgggcaaatgagtgataccctggctctaaaaaaaaaaaaccgttaatgaatatacttcttctgatactaaatatgtcaatatttagaatgtaatattcagtgattacaactgtaaaggcaaaacacacagaaataaccaccaattcctctgtagttctctactaattcaattttgcatcctctgagactatatgtcttttcttctcaaacatcccacaatgccaaccactgtctccagaaataactgaattctgcttcatgatctgccaacaaaacagaagccaaaaacagaagataggaatttgttaccttttggctaccaaatctatctgcatttgtgcctatttttttccctttccagaactgatgaaatgtctattttcctattttagacaggtgatctaaaagctactacttttttttcttttttcattcctttcattggctccttcttttaaattatcaatcttatcttctttactaaattcattgccaaaagattacaaaaatgctatagagtcacctaagctaaaaaatcccttcaaagactttttatcctcctttaggtgccaccccaaatctttgctcctcttcacaccaaagttctttttttttgagataggttctctgtcgcctagacaggagtgcagaggtgtgatcatgactcactgtaacctcaacctcctgggctcaagtgatcctcccctcttagcctctcaagtagcagagactataggtgtgtgccatcatgcctgggtaattaaaaaaatttttttttgttgaaactgggtctcactatgttgcccaggctggtctcaaactcctggcctccagcattcctcccgccttgggctcccaaagtgttgggattacaggcgtgagccacctcgcctggcccaatagtcaaatttcttgataagagttatccacatattctactttcatttctttacctcccatgcccaccccaatctggaatttaacattttatcacttttatcagagtcaccgttaacctccatgtagccaaattaagaagtcttcttgaacttaacttctggccttatctgatttagtttattgaattgctgctttgtttaaaaattcaatttatttaacttttgaactagtaattcaaagttacatgctcaatttacatgctcaaaaagtataaaaatgaatacagagaaaagtctcctatactatccactgagtttctctccgtgaggtaactattattgttagtttccttttcattcttctaggaattcttttgcgtatgtaaagcaaatacaattacatattcttattctttccccacttttacacaaatggtatttatttcacttaacacatcttgcagatttttctatatcattatatagtgtcctcatcctttttaacagctttgtcaagatatgattcacataatattgagttcacagagaatgtaccagccatatcatatggtaagtatacaattcagccaggcacagtggctcatgcctgtaatcccaacactttgggaggccgaggcgggaagatcccttaagcccaggaatttgagaccagcctaggcaacatggtgaaaccctgtctctacaaaaagtagctgggtgtggtggtgcgtgcctgtagtcccagctacttggaaggctaaggtgggaggatcgcttgagcccaggatgtcactgaagtgagcctgaagtgagacataatcgggccactgtgctccagcctgggtgacagagtgagactctgtctcaaaaaaaaaaaagacataattcagtggtttttttgtatattcacagaattgtgcatctatcaacactaatttctgaacattttcatcaccccaaaaagaaatcccatgccacacccagccaatgtatcattttatacatatgccagcagcagtacttcccaaactttaatgtgcacacggatcaatataaaatactattagtccaggaccaggtacggtggctcatgcctgtactttgggtggatcacttgaggtggatcacttgaggtcaagagttcaagaccagcctggccaacatggtgaaaccctgtctctactaaaaatacaaaaattagctgggcatggtggcacatgcctatgtaatctcagctactggggaggctgaggtagaagaatagcttgaactcaaagtggaggttgtagtgaactgagatcacgccactgtactccagcctgggtgacagagtgagactccacataaaaaaaaaaaaaaaaaaaaaaactcagctgggcgtggtggctcatgcctgtaatcccagcactttgggaggccgaggcaggcagatcacaaggtcaggagattgaaaccatcctggctaacacggtgaaaccccctctctactaaaaatacaaaaaaatcagccaggcgtgatggtgcgcacctataatcccagctactggggaggctgaggcaggagaatggtgtgatcccgtgaggcggagcttgcagtgagctgagatcacgccactacaatccagcctgggcaacagagcgagactctgtcttctattagtccttcctcctattacgataattaagcaaaacatctcaaaaagcagcttaattgtatatttcaattctcaattgaatatatattgttttattttcactttaacttttatatttattgttattttattaaaataaaagacagtaataaaaggtgaaatgccatgtttaatcagaattcctctccctgtgtggctgaaatgatggtaaggtcatcctaattatttctattttgttcaacatgtttcaagtaaagcaagtgactgaaaacttcagagtgaatatgaacaaattcctaatttagtgactatggaaagcaagtaattggactaagataaaagacaaatacacttaaagggcctcataaaaagaatttcaacatactttttaaaaagagtcaactttagacttcttttaatagcccaccttagttgctggggattttcatggataccaaccacccagtagtgatcagattttcctttgcagtgctctcttgtattacatataggagtccacgtattaccaagtcctctgttaagcattcgaacaattccttctgaatccacgtaacaaggggtacctaaacaccaacagaaaaatcacttggagacatagctacatgttgttaaaggaaccctatttcaaatatattatacataccaaggattcaactttgctttcaaaagcaaaacacaaaacagaagcaaataatctaagattattacgtaaaatttcattaaccatataaagtaagacctaactaaaaaaagaaaaaacattggatttgatatgactaaaatttacacaaataaagtgaaaaaactgagtttcagtgaaaactatgccacctgctggaagataataataatttcatttatttatttatttattattattattttttttttcgagatggagtcttgctgtgtacccaggctggagggcagtggcgcgatctcggcccactgcaagctccgccttccaggttcaagccattctcctgcctcagcctcccgagtagctgggactacaggcacccgccaccacgcccagctaatttttttttgtatttttagtagagacggggtttcaccatgttagccaggatggtctcaatctcctgaccttgtgatccacccgcctcagcctcccaaagtgctgggattacaggcgtgagccaccgcgcccggccgataataattttaaagccaattttagtaaaaaattaaacatgaatcagaaggctcccgcttgagaaacatttagaaaaatgaccaaaatctgatacaaagtgatctttacgaaatttatctttagtactcttcttcctctctcttctttttgttggccttgtcactactctgtccccaactactaggtaagcaattcttacctcgtaaaacagggaagcattcttgttttccacctattctgcttccaactcaggaaatctgtggcaaattacctgattatcccttttcttatctgtggcttcacacccccctcactctgcaaacattagtttccgcagggtctggatctaattggtacttcggagaaaaaaatctatacaaatggaagttatcaatggttcatattattaaagcctgaatgactaatagaaaacacatttagaaatggttgatattttaaagacaaagtggagtttccagcaatgtaaatgaagaacatgaatctccaaaaagagaaatatttaagtccccatgagacagagatgacaggtgatttaaaataaggtactcctgggccaggtgcagtggctcactcctgtaatcccagcactttgagaggctgaggcaggtggatcacctgatgccaggagttcaaaaccagcctagccaacatgacaaaaccccatctctactaaaaatacaacattagccaggcgtggtggtatgtgcctgtagtcccagatactcgggaggctgaggtacgagaatcacttgaacccagaagacagaggttgtagtgatctgaggtcacatcactgcagtccagcctgggtgacagagtgagactctgcgtcaaaaaaaccacaaacacaaaaacaaataaaataaaataaggtactcctcagtgtctttcaaatcatctgtcataagcctctagaatttggtctaaaatagcacttatccaaaagaaatatcatgtgagccacaagtgtaatttttaatttcctagtgccacattaaaaaaaaaatggctacataccatgtatctgaacaacaaaaaaaagttaagtgaaaaaatttaggctgggggcggtggctcacgcctgtaatcccagcacttcaggaggtcgaggcgggtggatcacatgaggtcaggagttcaagaccagcctggccagcatggtaaaaccctgtctctattaaaaatacaaaaattagccgagtgtggtgacgcaagcctgtaatcccagctactcagaaggctgaagcaggagaattgctggaacccggaaggcagaggttgcagtaagctgagatcgcatcattgcactccagcctgggcaacagagcaagactcctaatttattccttaaaaaaaaaaaaattttaaatagagatgggatctcactatgttgcccactctggtcttgaactcctgggctcaagtgatcctcctgcctcggcctcccagagtgctgggattataggcatgagccaccatgcccagccaaaaaaaaaattatttttaaagaaaaaaaggatgaagttaatgttaataatacattttatttcatcgaagatatctcaaatattatcatttaacatgtaatcaacataaaaaaattgatttttatatcttttttcatgctaagtcttcaaaatccagagtattttacacatacaagcacatctcagccatatttcaagtgctcaacagacacacatactagttattgtagtaaacagtgaagctctagaaaattctaagttttctgtatgatctgctggaaaagacacaacttattattgatttgtatcacctccttgctatttaatactttcagaaaaatatatttccttctttataagttttctaatgagaattctcatgaagagagctcttagccgggtgcagtggctcgcgcctgtaatcccagcactttaggaggccaaggtgggtggatcacttgcgcctaggagtttgagaccagcctgggcaacatggcaaaaccctgtctctacaaaaaatacaaaaattagctaggcatggtggcacatgcctgtagtcccagctactaaggaggctgaggtaggaagatggcttaagcccaggaggtggaggttgcagtgagccgagatcatgccactgcactccagcctggacaacagagccagaccctgtcttaaaagaacataaaaataaaaacaagatcttatacataaaacaatggctaccttgcctaaagattgcagctcccagttctgccaacatattaaaatagaaatttaaaatataaaatagagataatttattcttaaattaattaggaataaaacaatgaaataattttcttcttgaagaatatctaacactttatattatacttgttttttttaaacaaatttatcttgccttcagctgaaaacccaatccatgcaaggtaggatttccttgtaagaggaagagggtcaccatgcaaaatttgttttttctttttccccagctctagcagttgaactccaaggcactgatccccatcaaatcctgtacctaatgagaaaatgtaaatataaatcaggcatcaaaggttatccaactataacgcagtctaaattattttctgtgaattgattttgtggtaaattactagactgactagcactactttttatgaataacccatccaactgaggcatcattcaggtattagaaacacagtaagatgttacatggactcttcacataaagtccttataagtgggcatttattcactcaagacatatttacagagagcttactacacgccagcattggcctagatactggggctacagcaataaacaaagtcaccactcttattaaattcaaatttcaggtagaagacaaattaaaaaacacaaaaagaacaaaaaaattatcacaaagttaaaataatgtgatacagaatgtcagagtggtttgttagactggttagtcagaagtgacctctcagaaagtaaagtttaagctgagacatgaactgcaagctggagcctgccatgcaaacattaggggaaggaacacggaagtggatggagggaacagctaatgcaaagtcctaaggtaggaagaatggagggctcgaagaacacaaagaggcagtatggccagaacatggtaatgagaaacaacggtaagagatgaggttggagaggcaggcaaaggtcagattatacgggatcagtagatcaccttgacagctatcagaagtttgactttgattctaaaagtgaaggaaagtcagagggatttgagaagaggagcatgatctatatttttaaaagatcacctaggctgctctgtggagaatggactgtggaaggcaagaactgaagctaaaagactagttaggaggctactatgacagtccaagagatgacatccaggttgtattagcagaagaaatgaaaagagacaaatttagaatgtgttattccatagaattgacatgatgatataattttactgttggagttgatgcaggggaaatggaaagagaagaatcgaggataatttttagatttttggcttcagccactagattgttagtaagccatttactaagatggggaaactacataagaagcaagcttggaaggaaaaaaatcagtttttattgtgagcaaattaagtctgaaatgtctgtccaaactctaaatagatttcaagtaggcaactggatgtgtaagtctggagacacaaggagagggtagggttggtgctatcaacttaaaagtcatagacactgagatgtatttaaagccatggattatgataaaattccccagggtggtttctcaaactgcatattttgacctaagagtcatggaatcaattttaatttgcaactagcattttaaaaaatgaaataaaaaaatttaaactgatatcaaaagagtaaacattgtccaggagacttttatttcagttacatttgcagatatttatagaacagttatatagaatatatttcttttcttctgtttttcttttaaaaatagaaacaggggcttgctattgctatccagacttgtattgaactcctgggctaaagcaactctcccgcctcggcctcccaaagtgctgagattacaggtgtgagccaccacaccacaccacaccatacctggtccagaatctatgaatctatttcttactgtggcaaagcagacaaaaagactgaaagaccctgacctagagagtagtagagaaaaaggggatacactccagctaaaagatagagccaacaaaaaagtaaaaagggagctgccagtgaggaaaaatattgaaagtatgatgtcacagaagtcatgagaagaaggtattttcaatggaattatttttttaaaaaagcacagagattatcggttaccttgataagaccagtcttagcatagtgacggggactgaagaaagacatgaggggaggaaaaaggaggcagcagcttttaaaaagtgtcacattcagagttgttttggcccttcctactaggagttatttttgtggaatttcaacgctgaaagttctctggtcgtgcttgccaaaatggtaagatttagacatggaagtaattaaccaaattccaccttggaattctctctataatatagttctattaagaaacattttcattttcattgctgctagtgaacacaacaaaattatctacatttaaagattacacggattcaaaaggaagtatataatccaagacaaaaagagtaacaaaaacagcaaaaaagctcaagtaatttccattttacttcaagtcataaaagactgaaaaaaatctacctctgtgataaacaatgaaaagctgttctccatgtcctgccattgacaccacaggtccagcaaggctgaatacctctttttgaacccctccaatagtaaacaatcgaagaagcagggcactagtagcggcagcagcccatccttgaccgagacatatggcttcaatatcctcattctgaggcaagtctattatccactctttgcttgaatcccaagaactaaagtgcaggcagtgaagcttgctaaaaattaaaacaagacagaaacaatcaaactttcatatgatatttacatatatatatatataagcaatcatgatattcaacaaaaaaaccaaatagtttacttcctattatacactagtataagaagttgctttaaaaaagtaattatgaaatacccttaaaatgaactatattgatatctttccagccttttttctttgcacatacatatatgtaagttattattaaatacaaattctttttttttgaaatggagttttgctctgtcacccaggctggagtacagtggtgtgatctctgctcactgcaacctccgcctcccaggttcaagcaattctcctgtctcttgcctcagcctcccgagtagctgggactacaggtgggtgccactgcacctggttaatttttgcatttttagtagagatgcagtttcaccatgttggtcaggctggtctcaaactcttgagctcaggtcatctgtccgccttggcctcccaaagtgccgggattacaggcgtgagccaccatgcccagcctgaaggatacaaatttcaaatcacatagaagatagtaaaatccatgaagtgtatcagtactataatcagctgaagaagggatcaagagagggcaatctcttgattaacaaaaagctgaaaaaatattttcttttcttttgaaaagaaaaacattctgcacccattgctttcccatcataatttttttcttgacatctatctacctatttacttacctacctacttatcaaaacatgtaaacatccaaaaaatattaagtagaaaaagcaaacgggtgactagtacattttttggtttgtttttccgtttttttttcctttctcgaagagagattttaaatttaatccatcatgacaaaaatgtagattaatagttggccaaggctcaggttgaattaactgcaaagggatataagaaaacattcttgggtgataaagacgtagtgacaaaaatctagactaatagttggccaaggctagggttgaactaactgcaaagggatataagaaaacattttcgggtgataaagaacattctgtattttgattgtggtaggggttatctgtgtatatacacctttgtcaactcatcaaatgggtgcattttattgtaaataaattacatctcaataaagtaaattaaaataagggaggttcaaatagaaagaaatctggaaggatacatatcaaattgtaaatagcagttatatctgagagtagaattctgggaggagttttcattttccgaaacttctatactgtatactggttttttttctttacaatgaatgtatattactcttataatagtaaaaaaaaaaaaaagcacttaacaatgtaaaaaaaaaatcccatctcttgcattactaactatgccatgtcattttgctatgtagttagagcatgtaatgagggaatcattatggcaaaaacagacatatgttctgaggtattttgggtgtgctggtgtttgtaccaaactcttctgaaatttcatattacaaaaaataaattttgttttattaactttttgtctttaatttcaacaactgtatctaacagttcaacagtgccaaattcttcctaataatcttgagtttaccttgctagttcatcagtgctttcacatgccaacaaaatagcttcgtgggaaagatctgctattgtataattcaaagtgtttgataagtgtgttgcatggtgtatggaggtatcatggaactccacatctatggcattgtcttgctcatcattatagcagcgaataattccaatagagttccacacctacaaacaggtaagattaaatataagtctgagaaaaactgaagctcctagaatcagtaagccacagtagtacaaattaacaaatattataattaaatttgtattaagatttaggttttgggagttactacatctcatctatctctaaatagtttctgacaggagtcataataccagagctacaattacttattatttccttggtgagaataagatacatatatacttattaattagcaaatagagtatttaataatatttaaaaataaattacatgactgttactttaaaagcacattacagttgtcctttgaacaaccaaaccattaaattcctcaaaagaaatatttcaaaaattgagttttcttacaaatatggatgcaaataacaacagacttttttcctaactattctatgataaaataaatacatacattttaagaaaacataatttttttttttttttggagacagttttgctctgtcacccaagctggagtgcagtggcatgatctcggctcaccgcaacctctgcctcctggattcaagtgattctcctccctcagcctcctgtgtagctgtggttacaggtgcatgccaccaggtccagctaatttctgtatttttttagtagagatagggtgtttcaccatgttggccaggctggtctccaactcctatcctcaagtgaccaacccaccttggcctcccaaagtgctgggattataggcgtgagccatcacgcccggcagaggcaacataaattgataccacttggaaaacttatcttccactgatgtccattataggctcacactaggccctagagtttctaataaaattagtgccaatattttatttaacataactataaataaaatattgacactaataaaaaaattaagacctatgacttgatgactactgatagcaataaaaagttttattaatattaatcaccacccttaatctttacataaaaatttatgccaggcctatactcttcaaatttatgccaggcctatacttttaaaaaggcaaaatcctcagaatggaaaacatcatataaccaacacagaaaaactaaactttttaagaactcaggccaggcgcggtggctcacgcctgtaatcccagcactttgggaggcctaggcaggcggatcacgaggtcaggagatcgagaccatcctgtctaacatggtgaaatcccatctctactaaaaatacaaaaattagctgggcatggtggcaggcacctgtagtcccagctactcgggaggctgaggcaggagaatggcgtgaacctgggaggcggagcttgcagtgagcagagattgtgccactgcactccagcctgggcaacagagcgagactccatctcaaaaaaaaaaaaaaagaactcaaatctaaggcaaaaagccaatatattcattttgtctattcatgaaatatatatttaatgtgcactgtatcataccttgttccaaatcctaagaacatatcagtaaacaaaacaaaaatctttatcctcgtgtagcttacattctggtgggtggtggagtgaggaaaagggtcagacttttccccccatagtacttgccaccttctaatatattatactagtagttgccttctaagaaagcacctccttactagtgttttggagtcagtataatcttctatgtaacaatgaccatgaagaataaggtttgaaagtattgccaagaaatattgcaagatagtaatatttacttatgttcatttaatgtcattttggaaagcagaattttatttaacatcattttcaataaggttgaaacaagattaaaactgtgagctaaccataaaataaaccaaccacaaaactgtaatcaaccaaagtgctccaggctacttaatcaaagtttttaaaaatatgttttatccaaaaaaattaactatagtaagaaaaaagtgctgaaaacctactaagaagttaagtgtagatccaagtcttaccatgaatctgtgagtgagatgcaacggtgtagaacctgactgaaatggcttttgccggggagttggcatgggtccatcataaaatggcctttgggatgttacaagtggtagattgtgaatgctgccttcttgaccatcttcctcctcctctttgagaagactagaaccagtttttagcattgaaatatctacaacacaaaggatcataattaagggaatcacgaataccaatgatttggaaaaaggaaagcattatggaatctagtaactttttcattcatattcaatgacactgacatgctatttgcctctttcactgtgttaaagagatgcagtgatggtgcaaaagcaatggtgggtaaaattcctggtgccttggcaccaatcaaggcagtggcacctaactgtattagtcgttactgcattgttaaccactactcacttgcagtaaaaatattaattttattaaatcttgacgcttacacagattttttttttaaagttctgtgtgctaaaatgagaagtgtgatggttgtcttgaaaaaaagcacttatgcaattgtttgagttgtaagctgaactaagtgattttttttcatacaacactacttttacttaaaaaacacatgccagataaactacggttatgcagaattggatctttggcaaacattttcttgtaaatgaatgaagtgagcctatcaattaagaaaaaataactggcagaatttgttgccaatgataacatttgagctttcaggccaggcacggtggctcacacctgtaatcccagcactttgcaaggccgaggcaggcagatcacttaaggtcgggagttccacgttgaccagcctggccaacatggtgaaaccctgtctctactgaaaatacaaaaattagccaggcatggtggcacatgcctgtaatcccatctactcgggaggctgagacaggagaatcgcttgaacccgggagactccgtctcaaaaaaaaaagagctgggcacagtggctcaggcctgtaatcccagcactttgggaggccaaggtgggtagatcatttgaggtcaggagtccgagaccagattgacctacatagtgaaaccccgtctctactaaaatacaaaaattagcctggcatggtggcgggcacctataatcccagctactcaggaggctgaggcaggagaatcacttgtacccagagggcagaggttgcagtgaaccgagatcgtgccactgcactctaggctgggtgacagagcaagactccctctcaaaaaataaaaacaagaaatttgagctttcaattaaaaattaagatattggaaagcttctatttgccattatgagcttcacaactttctaatacttagaaactactgatgagattggtaacaacactagcagatataatttacagccaggtgctgtgactcacgcttgtaattgcagcactttgggaggctggggagggaatatcacttgaggccaggatttcaagaccagcctgggcaacaaagcaagattccatctctacaaaaaataaaaaattagatgggcatggtggcatgcatctgtagtcctagctacccggaaggctgagtgggagaactgcttaagcccaggagttcaaggttacagtgaggtgtgatgataccactgcactccagcctaggtgacagagcaagatgctatctctaaaaacaaaaattaattaattaaaaacaacatataattaattaaaaacaaaaacaaataatttatattagataataaaaagtgtcagtataaagaggatctataaacttcagtgaaccaatattatcaattcatatgttacaaaattaaacatgattttaaaaaatccattcaacattcaagtcagaccaatgaattttttgattttattttgtttttttctgagacagggtctcgttctgttaccctgcctggagcccactgttgcaatcatggctcactgcagcctcgacctctcgggctcaagagatcctcctacctcagcctcccaagtaggtgggattacaggcacacgtcaccacacctggctaatttttaaagtttttttgtagagaggaggtctcactatgttgccctggctggtcttgaactcctggcctcaagcaatcctcctgcctgggcctcccaaagtgctgggattacaggtgagagccaccattcccagccagaccaatgaatcttaacataacagagccgtaagagttcactgaagttttcagattacactttgcaagtaatctttaggaaacgatcatcttctgagtcttggtgcaacatcaaagaatatccacaattaattgaatgtgctattaaaagatttcttaaaatacttctcccttttcaaattacatatttatgtgaggccaaattttctttatacacttcaaacaaaaacaatgtatagcaatagacttaatccagaaaagtagatgagagaatccagctatcctctatgatagacattacaaagattgcaatgccactcttctcactaattttttttgtttttcataaaaaagtactattcatgtttacatgagtttattaatgttatttttaagtgaataaatatttttaaatttctgaattttaatttctaatatgtaaatgacgatagccgtaactctgtataaataaatgctctcggaagggtcctcaaaattttttagagtataaaggctactgagaccaaaacatttgaggactgctgttctataaactctatatgactttaaaaagcacaacatagcactgcacattggcattttacttgataatgttcaagtgttattgtagcatgtaagttgttacaataagcactctatttgaagattttcaattacaatctcaatttcttcattttacttgataatgttcaagtgttattgtagcatgtaagttgttacaataagcactctatttgaagattttaaattacaatctcaatttctttaatagatacaatactattcaggttatctattacttcttgagttagcagtggtactttgtgtctttcagaaaattcgtctatttcatttaagttgttaaatttatgggcacaaagttattcataatattgccattatgcctttgatattaatagtagcactgccatacagacatataatgtgagttacagctgtaattttaaattttctaatatttctaaagtttaaagagtaaaaagaaacagccataatcttaataatatagtgcatttaaaatacatattatcatttcaacatgtactcaatataaaaaatttcccaagatttttacattctttttttcatattgtcttcaaaatctggttgcactccatggtgaaaccccatctctactaaaaatacaaaaattagccaggcgtggtggcgcatgcctgtaatcccagctactcaggaggctgaggcacaagaatcacttgaatccaggaggcggaggttgcagtgagccaaaatcacaccaccgcactccagcctgggtgacagagtgagactccgcctcaaaaaaaaaaaaaaaatccggttgcactcataacatatctcagtttgaactaaccacatttcaagtgctcaacagctacatgtggctagtggctactatatattggatagcacaaatctacagatctatagtgatggcccacctctctttcattctctatgttagtaatttgtgtcttctctttattgatcaaccacgatagatatttattaattttattgatcttttcttttctttggagatggagtcttgctctgttgcccatgctggcatgcagttgacgcgatctcggctcactgcaacctccacctcctgggttcaagtgagtttcctgcctcagtctcctgagtagctgggattacaggcacgtgccaccacacccagctaatttttgtatttttgtagagacagggttttaccatgttggccaggctggtcttgaactcctgacctcaagtgatctgcccatttcagcctcccaaagtgctgggattatagacgtgagccaccgtgcccggccttattgatcttgtcaaagaaccagcttttggtctcattgactttctctataggttttctgttgtcaattttattgaattttgctctgtattatttccttccatttgcttggggtttagttttctctttttctagtctgccatagcagaagcttggattatagatttgaaaccttttttaacaaagtcatttaatgctataaaatttcctctaagcaccacttagctacattctacaaattcaataatgactttaatagtgttaataaaaaatctaaaatattaatcaacagggtaatcacatgcacaaagtcaaattcttaccaactgagttttcatcatcttctaggatgtgacttcgctgtctaggacgacctgaagccatcatgaggtcttcatcatcctcatcatcatttataatcccttttgaaaaagaagggatctcaactgcattgtcatttagaaaatcaccagcattactcatatcatc

SEQ ID NO: 1317 - DNA, 312 bp, Homo sapiens
tttctttttctttttttttttttgagacggagtctcactctgtcacccaggctggagtgcagtggcacgatctcggctcactgcaagctccacctcctgggttgacaccattctcctgcctcagcctcctgagtagctgggactacaggcacccgccaccacacccggctaattttttgtattttttagtatagacagggtttcaccgtgttagccaggatggtctcaatctcctgacctcgtgatccgcccgcctcggcctcccaaagtgctgggattacaggcatgagccaccgcgcctggccgaacatc

SEQ ID NO: 1318 - DNA, 140 bp, Homo sapiens
ttttttgtaatttttagtagagatggggtttcaccatgttacccaggatggtctcaatctcctgacctcatgatccacccggctcggcctcccaaagtgctgggattacaggcgtgagcccccgcgcccggcccacaatc

SEQ ID NO: 1319 - DNA, 167 bp, Homo sapiens
tacaggcgcctgccaccacgcctggctaatttttgtatttttagtagagacggggtttcaccgtgttagccaggatggtctcgatctcctgacctcgtgatccacccgcctcggcctcccaaagtgctgggattacaggcgtaagccaccgcgcccggcctgaaatc

SEQ ID NO: 1320 - DNA, 5667 bp, Homo sapiens
agagcgactctgtctcaaaaaaaaaaaaagtgacagagaagcaaagaagctgcaaagaccttcacaataggccttaaatgatatgggattagacaaaggtctgatggaggccaagggcccatacccaggcaagtaccaaggggactcagaggcagccaatgcagcagataggagcagtcccactgggatctggagaccacttgcagtgaggggtgccataagggtgtggattctgtcacctgagtaggtctgcagtgagggtcagcaggaaccaggaaaacctccataactcgatctttcttcaagggcagtggcagcgttagatagcaaaatgggtcaaaggtcacagaaaccttagcacattctgggcaaaccaaagtagatttgaagaggccatggaaagtatccacaatcacagaatcattcctcaacctgtgattctcccaggcttcctttgccaccacctgcgtcaaagggataaacaggacattctcaacacctctcagccccttgcccctgcatccagaatgactcacagcaaacctggagatgaatcaggtggcaatctgtacagccaagagcttgatccaggacaaacaaggccaggactactcttagtgtatcatactcataccacatgccagctctacgcccaatccccaccccaacacacatatatatatttcacatatatgtttatatatatacatatttcaaatatatattatattgattgattgagacatggtcttgctctgtcgctcaggctggcgtgatcatggttcactacagcctcaacctcccggactcaaagcgatcttcctgcctcagactcccaagtagctaggactataggcatgcatcaccatgcctggctaatttttttaggtttggtagggatgggggtcttactatgttgaccagacagttctagagctcctggcctcaagtgatgctcccacctcagcctccaaagtgctggaaccgcaggggaaagccactgcgcctcgccctaatcctcacacttaataaggttggcaacataggacctattggaaactaggggtctgtgtgtcctgataagaaacagaagcccggagaacactatcggtacagagacatggccagggcaaggaaagcccccctatatgtttccagtgatctaaagtaaggtttttggcggggcacggtggctgacgcctgaaatcccagcactttgggaggccgaagcaggcggatcaccagaggtcaggagttcaatatcagcctggccaacatggtgaaaccccctctctactaaaaatacaaaaatttgctgggcatggtggcacgtggctgtagtgccagctacttgagaggctgagacaggagaatcgcttgaacccgggaggtggaggttgcagtgagccaagatcacgtcattgcactccagcctgggcaacagagtgagactccatctcaaaaaaaataaataaataaattttaaaaataaagtttttatctatactacagctcagctaactcatagtttttctaagaagatctaaattttactttaaagcattcatattgattatcccaatgtgatagggtagctgaaatactaaaatcctcttgcactgatcagataatcaaggcaaaaggtataaatgtcctaatgatactaataacaaattaagtaatcatggatggattttattgtgagcaataacaatcttaggggtcctcactataggtactttacagttttcagagtgttcttagtccctagttcaccagtgaaatatcaaacaagctcactctaatttgaaaaagcccaagaggaagccttaggagtaactagggtacagtgcctcacgcctgttgtaatcccagcactttgggaggctgaggtgagaagactgcttgagctcaggagctggagaccagcctagacaacacagcaagtttctgtctctatttaaaaaaaaaaaaaaaaaaagcagtaactacagttagcccctttctgaccagagaccatatccctataactagctacagtgagaagcaaccagggccctggcaacaacactcaaagaccagaagaatatccctgcactctcaataggaggcagcttctttggcatattatcattcagacatcattaatggcataccgcatctggccgcccattggcatccttcagctccaagtagggctttttctttacccggttcagatcttcatgcaatccatctagaagaaaggccagcagctcctgagaatcttgttgctggtagccagaaaattgaggagcaaaacgtcctacttgagtctacaacaaaagcaactgtatcagaaggcataatacgtaaagaactagttaaatcaaaaaagaattgccatcaaaaatagctctgaggagttagctggggcagtgagagagaacacttggttgagtagtccaattaactcctgaagagcctacaggaggccagtggttcccaccagaaagaaggcctagatcagagagccaggaggatgaacctggaacctgggccactgccctaagtcctaaggaggaagggtggagtaccctgagtaaccacacccaagtactgacatgaatccctctccaacatgtccttctttggttcagagtcttaaactccataaggacattacaaacaatactttcatcagctggaggaatcctcctgtacataacagccctcaggtccctaaatactgtctgtccagtaatactctccaccagttattctgagagtatggtccccagtcgcagcattagtatcacctgggagcttagtagaaaagcacattctcaggccccacaccaaacctattcaatcagaaactctggggatgggtctagcagtctgtgttgtattaagcactcccagagattgtgatgcatcctatggagaaccagccaggcacggtggctcatgcctatgatcccagaattttggaaggctgaggcaggcagatcacctgaggttgggagttcaagaccagcctggccaacatggtgaaaccccgtctctactaaaaatacaaaaattagctgggcatggtggtgcacacctgtaatcccagctacgcaggaggctgaggcaggagaatcacttgaacccaggaggcggaggctgcagtgagccgaaattgtgccagtacgctccagcctgggcgacatagcaaggctgtctcaaaaaaaaaaaaaaaaaaaaaaaaaaggagaaccactgttctacacctgttctctaataccatagccactagccacatatggcaattgaaatttacattaattacaattaaaaaccattaaaaattcagttcctcggtcaaatgaaccacatctcaagtgctcagaggtgcttgagctggtagctaccaaaacacagtgcagatatataacacatccatcactgaggaagctccacacttccctaatacccctaaacactaccttccagttgtttatttacattagcttcagcacagtgtgttgccacccaattcttttttatttttttttctgggacagggtctcactctgttgccaggctggagtgcagtggcgcaatctcagctcactgcaacctccgcctcccaggttcaagcaattctcatgccttggcctcccgagttgctgggattacaggcatatgccaccacgcctggctaatttttgtatttttagtagagatggggtttcacaatattggccaggctggtcttgaactcctgacctcaagtgatccacccaccttggcctccccatgggctgggattacaggtgtgaggcaccgcacccagccgttgccacccaattctagtttctttgtgacttagtatgtgaacagtcatttatatatttcccagggattcatgtgaccaaggggatgaaagataattagttttcaatttcaacaaaccacctgagattttagttttctcactgagctaaggtgctattttttttcctctctgaatcataaatatgcatgtcttttcttatcatatgcttcatgaagctccatgaatcccagtggtacaggctaaataggatctttcagatttcagcttaaatctgctgagcgggagggagcaaagcacctccacctcagcaggaaaaagcagttggggcaatggaaagcccaagttgctccgagtgtatccatgtcttctccttaaaccttcctggctgagggaccccagtgataactgcccctcacatcaccttccaagaatgtgagcccaattcctgacttagggggtcccaactcaaaccacgaagcctgtagaatccaggctcagagaacctggaaacagccttcagatgatactagaaattaaactgaattttcattttttttagagacagggtctctgtcgccaaggctgggtacagtggcacaatcacagctcactgcagccttgacctcccaggcttaagtaattctcccacctcagcctccctggtagccgggactacaggtacatcaccatgtccagctaattttgttgttgttgttgttgttgttgttgagacagagtctcactctgtcgctcaggctggagtgcagtggcgtgatctcggctcactgcaccctccacctcccaggttcaagcaattctcctgcctcagcatcctgagtagctggaattacaggtgcgcaccaccacgcctggctaatttttgtatttttggtagagacggggtttcactatgttggtcaggctgatctcgaactcctgacctcgtgatctgcccgcctcagcctcccaaagtgctgggattacaggaatgagccaccacgcctggacttttttgttgttgttgttgttttttctttgagacagagtctcgttctgtcacccaggctggagtgcagaggcgcaatctcggctcactgcaagctctgcctcccgggttcacgccattctccttccccagcctcccgagtagctgggactacaggcgcctgccatcacacctagctaattttttttttatgtatttttagtagagacggggtttcaccatgttagccaggatggtctcaatctcctgaccttgtgatccgcccgcctcagcctcccaaagtgctgggattacaggcgtgagccacagcgcctggcccagatcccatcttaatcccaaaatgcaacgaaaggaatgcctcataacaacactaaaccactctccccaaagtgggaaaaaggaagtacgggagagtatcccttatccaaaaatctgaaatccaaatgcttaaagatccataacctaacactgacatgatattcaaaggaaatgctcactgaaacattttagattttggaatggggatgctgaactagtaagcataatgtaaataccataaaaaaaaatcctaaaaaacctgaagtcccgaaacatttctggtcccaggcatctatatacagggatacccaacccatatatatatatgtctacctactttgaacatgcgaggtgccacatgggcgtcccttccagaccacatctgcttaatgagttcagcataggcttctgcaatttcccctttcatccccagagggttgtctctgttgatttcggcttcatactcatctttgagaaagtagtcagtcagtggtgcagtgttgctcaaacactgaaa

SEQ ID NO: 1321 - DNA, 141 bp, Homo sapiens; identical to SEQ ID NO: 1315

SEQ ID NO: 1322 - DNA, 153 bp, Homo sapiens
caccacgcccggctaattttttgtatttttagtagagacggggtttcaccgtgttagccaggatggtctcgatctcctgaccttgtgatccacccgccttggcctcccaaagtgctgggattacaggtgtgagccacggcgcccggccaaata

SEQ ID NO: 1323 - DNA, 131 bp, Homo sapiens
tttgtgtatttttagtagagacggggtttcaccatgttagccaggatggtctcgatctcctgacctcgtgatccacccacctctgcctcccaaagtgctgggattacaggcgtgagccaccgtgcctggcc

SEQ ID NO: 1324 - DNA, 8247 bp, Homo sapiens
aggtttcttgccttgatgtactggagcaatcagatcacacggcggcttggagagtgagtgcaaggttttatgagtggaattagccctcagcagatgggggagccagaaggcagttggagtgggaaggtgattttcccctggagtcgggctgctgagcagcctgggctctcctctgaccgcccctgccaaactcatggttccatcagttgatggcctgctggtgcctgttggtgtgctttccacgtcctcttgacgtccagcggcttgtgtctctgcccactataaaaaaccactggggtttttttataggcacaggacggggacgtggcgggctcgggaaatgcaacatttgggcaaaaaaacagaaatgcctgtcctcacccaggtccctgggcacaggcctgggtgtggagccctggccagagaccacgccctcctctacccagcacttccctgcccccttccttatcatctggtcccttttctcagacaccacaacttccaagaaggatcactggtcctgaaccctgtgtcttgtccaggtgtggaccccagaaaagttggtcctggctgggcgcagtggctcacgcctgtaatctcagcactttgggaggctgaggtgggtggatcgcttgagctcaggagttcgtgaccagcctgggcaacgtgacaaaaccccatctctactaaaaatacagaaattagctgggtgtggcggctcatgcctgtggtcccagctatgtgggatgctgaggcaggaggatggcttcagccagggaggcggaggttacagtgaaccgcgatcacgccactctcctccagcctgggcaacagagcaggatcttgtctcaaaataaataaaggaaagttggtcctggccctccagcatttctccagggtccttttttcagcagggacctggcggaggcatcgccctcagagtcctctggacctggacctgcacacctatgggagcaggaaggacccttgtgacttccagtggcccccctgggtgccaggtcccacagtagccacagcaggagcagagtgggtggggtataaactcctatcacaggagggaggactagccgggcctggctgggtggacctgtgtctacagccacacatttcctgggaatctggaagcctgctacagagaggccaggtcccactagactgaaagaagttcctgttaatccaaaggcctgacctgaggaccacaggataaactgcgtggttattttggtgccaatcaggcacggggactgttgttcctcactgtgtgcctataagcagggggttcctgggggtagacgcaggagcaagagcacgctctggaaaggtgatgttgtcctctgcacctgagtactgacttgtggagaaggaaggtagcgccggcctctgctctgcttgatcagccctgctgaccactgggttctgtttctaccccagaaaatcactggttcaatggcagttttccacctgccacaagggaagccacacgtggcagggctggggagttacagcatacccccccgccccccactgcctcccagagcacgtccccttcctcctggcccctggcacgtgcttcctccacgcacgtcatggctgactctgccctctcaccttcctttcagaacccagggaccatgggcgcctccaggctctataccctggtgctggtcctgcagcctcagcgagttctcctgggcatgaaaaagcgaggcttcggggccggccggtggaatggctttgggggcaaagtgcaagaaggagagaccatcgaggatggggctaggaggtaaggatggggcaggtctggccatagaaccggctttcccagggcacagggattcgggctgtagggccacacccttggtttcaccactaagagctaagtgacctggagcagggggttaagcgtgagcctcagtgtcttcatctcagaatgaagaacagtccgcagcccttcggactcttgtgaagataaaatgaggaaatgaactcgaaggacttagaacggtgcgcggtgtgcggtgcgtgctgagtgcgtgttagctgttgtggtgcggtggtgctgggggctgcagggcgtatctggaagcctctgtgcagcagcttgaattgaaccctcccagcaccctcactgttgccgaagggctcgtcagtcacttggttcctctgtctgttcagtggagctgatgatcgctttcatctcacactcgctgtgcacaaagcctcactgcatcctcaacacagccagcttcacctaggaaggaactgaagcccagagaggttgagccgtttacccaagatcacacagtcctccagacgcccctcaaccctcacagggtaaatgagatcatctgtgtaaacatcgctgcacagacgttagcccccgttcgtgtttttgttctgagaaaggtaggccagcttgcctggagaggagaactacagagtaaagagggtcctggcacggaggaaagccaggacgctgcagcctagtggctttccaattttttcatcacaacctgcagtaagaaatacgttttgtactctgatagagtgtacacactcaggtgtgcaggtacagctaaagtaagttgcagtagccgcccttattacataaaagggggctctacttttccgattcatttctctttttttctccagaggtgggatctcacccatggcacactcttggctcactgcagcctcaaactcttgggctcaaacgatcctcctgcctcagcctcacgaacagctgggaccacaggcacatgccaccacgctcagttcgttttttaattctttgtagagatggtgtctcattaactcccaggctcaagcgatcctccctcccgggcctcccagagtgctgagattgcaggtgtgggccactggcttgacccttttttttttttcaattgcaatccactaagccgatttcccggggtacatgggtcccaaccctcagtttggagagccctgtgtgtgcttcccctccaaggcttgggaccccagaccgcagccacacggacacgttcgatcagtcactgtggcaggtgccagtgcgacaggctctgtgctgggggccgcagctggggaggaggaccactgggtgtgagtcgggcatacagcgtgtccctgccaggagtgtgtgcagagcgaccacagcacaggaaacaggaaaggtggccccgggggttctctgcccagccctttgtctttgatctgctaagactgcccatcagctcatggatttctgtagcgctgctctgtgtggggcctggggacatgaggaggaacaggtcagtccctgcctctgtggagctctcgtgtcatctggctgccgggttcaggagacctgcagaaggaggtctggtccatacctcgtggccaggggcctccaggagaaaggaagggagaataactgggcaccaggaaaatgctctgagggcctgacgttggctgggagagtgtggaaggagggaggaaggagacatttgcagaagcacagagggctggaggagcgccagctgtgcagagaagtggtgggtgtgagtggagcaggcagcggtgctgaggaggctggatggaggaactccaggtggctggatttccgcttctcgtcctgctggtgacaagcaaagcacaggccccctcggcagccctgctttattttcttctgaactttgtcacggtcgaaggaactttcctcctaccctctgtaaatattacacaaacagagggaccatcactccagaccctcaaagctgaatacagtggtggcttgctgtcagaccagggtttgagggggggaactgaggcacagagccggaagcctgtgacttccatcctcgggtgtaacctggagacgggggtttcaccatgttggccaggctggtcttgaacacctgacctcacgggatccacccgcctcggcttcccaaagtgctgtgattacaggcgtgagccaccgtgcccagccgagaccctgtcttaaagaaagaaagaaaaaaatccttcgttggggagcatctgcaagcatgaggaatgggggacactggagccagacaggctggtgcttaggggtcccagggccccgggaacccagcagcaaacagcctcgccctcaggggatgacgtaccatcagccacaggccaccagcacggccctgggcttcagtacctgcgagtctgaatggatttgctcctggggcaaccccaggcccgtgctgctcaggagcgggaggcagggaggagcgtcggcagcccggtctctggggaggctggttcctgctttatccacgcaatacccagtcctattctatcaggaggaccccaagatgggccctaactcccaggccaagagccggtttaggcaccctccccgcttgcctgcagggggcaggcctgagcgcctaaccccagtccagagggctggactcagaccctcctctgtggggcaggggacaggcacgtagggagtactgaattgtgggggtgtgcagatttgggcttcaggcgcacagtgtgagccgacctttctagacagcatccctggtccccaaagactagcgaggccggggacacaggagcagcgatgggaagcaggcccgccggaacctccgactcccacctccccacgccacggacgctgcaccaccctgtgtttttgtttcatgtatttctcaccctgttccccgtgttccgcctggggaaccgagtgccatggacagagcagacacttgggcagaactgaacagcgtcatcttcgcctgcctggcgctccctgcctgggaaatggagcttcagctctgtctcccggcggattcttgatgcttcctacgctgccatgtgctagggaagattaactaaaatcagtcacaatatcccactgggaggtgacgctttttaagacgagcaacagccggccgccaagaggcgggtgaggccccactgagcacttctattgcatctaactggggagccatttatacccaagtagaagcacacgttcactttgtagctcaagcccaactttaattagccatctgtatgaataaatgctgattccaggtccgtttcctctccagtccctgcagtttaagctgaggaggcatcgcttaaatcagaccatttagaccaggcatggtggctcacacctgaaatcccagcactttgggaggccaaagcagaaggatcgcttgagcccaggagttcaggaccagcctgggcaacatagcaagaccctgtctctacagaaaaacacacacacagaaaaattagccgggcatggtaagaggaggagactgaggtgcccagcggctgcagcccgtgcatccccagggtcccagcacagagtgggtgttcagaagtgtctgctgagggactgagcaagaacccgactgagcacagcaagcaaacgctcagaacgggaggtcagcagcaccgctgtgcccaacacgggtttccaccataacccgaagttggaacgttttattcttccataccaaacaggagttgagaaggcggctgggttccttgaggtgtggaatgtcatgcactcctcctttcttgcgtggaaagcccgaggtataaagtgtgtatgatgtttgcttttttttttttttttttttttaagacagggtctagctcggttgcccaggctggagtgcagtggagtaatcccagctcactgcagcctccaactcctgggctcaagcattcctcccatctcagtctcctgaggagctgggactacaggcgagtgccaccatgcccagctaatttctgtcctttttgtagaaacagggttttgccatattgcccaagctggtctcaaactccggagctcaagcaatcaatcctcccaccttggcctccaaaaatgctgggattacaggcatgagccaccctgcacccaacctgtttgcatttttattttttaactttaagctattaagggttaatgtttgcatttcttaagggaaaaacagaggagaaagagccaaaggaaaaacactgaaatggtagcattcctgggtgatgagtttatggcgttttgtttcctggttgtctataacaaatatgtaatttttaaattagcaacagcgttagactacttcggggaaacctggctctgtgtgccacgaagcagggaagggcttgttcccaggcgcagcagcacttgggcatcccgtggtgaagtcagccccttacacctcctccaggcacagctgtggggagcatgtcccgagaaggcgcaggaagaggcccaggccacgtgtcccgtgtggtcagcctggggaccagagttaaaaccagagctcctccttcaggaaacagatcatagaagcctgtggtttcatcctgtgttctcagagaagaggcaccaggctggaaagacatttctttgggcagacaggcccagagtatagggcccaggttcccagagcaagcgtcccagggccccggcggtcgtaactaccgctgcatgggctctgatgctcagccgcggaaaagcaagtaaccgggaatgaaggaagtggggtcagtcccaaccctgccacgtgcgggtctcgagacggtggacaagtggctggactccactgggcctgggctgtcactggtacacagagggcactgggctagaactgcgttcctcccaccagaggctccacaccatctccgggcccctccccagagcctctcaaccaaaatcagtgtcttcaaagttcaagttgattctgaagctcagccaggtcgggaccagataatgcattctaggggacatcctcctgggtctcccatccaccctggtggctccctgggctgtgtgtagatgcccagctcctcctccctgccatcgtgtgggcatggcaccatgccctgacggcctccctcccctgcccacctctgcccgcagggagctgcaggaggagagcggtctgacagtggacgccctgcacaaggtgggccagatcgtgtttgagttcgtgggcgagcctgagctcatggacgtgcatgtcttctgcacagacagcatccaggggacccccgtggagagcgacggtgagtctcacagggcctgctccccctccccactatgcgggtcccatctcctggctgggagaaaggccatccgcccaaaccatctctgagtgccagggaccgggcagcctgcgtccccctccaccccacagtgccagcgtggggcccatgagccgtggtctctgcaccgaggctccagtagcgtacctgcccctgctctgcgcccaccctaaaatgagaaacacggtaatgaggatgaaatataaacgatcgtcaggttcctcacgatcactcagtgaactcctcagagagtcagtgtacgtttgggctggccagacgcagtggctcacccctgtaatcccagcactgtggactgtgggaggccgaggcaggaggatcgttgagcccaggagttcaagaccagtctgggcaacacagtgagaccccatctctacaaaaaaacatggttttgttgttgttgctgttgttgttttgagacgaagtctcgctctgtcgcccaggctggagggcaatggcgcaatctcggctcactgcaagctccacctcccaggttcacaccattctcctgcctcagcctcccaagtagctgggactacaggcgcccgccaccacgcccggctaatttttttgtatttttagtagagacggggtttcaccgtgttagccaggatggtctcgatctcctgacctcgtgatcctcccgcctcggcctcccaaagtgctgggattacaggcgtgagccaccgcgcccggccaaaaaaaacatgttttttaagcatgaagtttgggttgcacctcagtgcctcctcttcccccattggtacagaaatgcgcccatgctggttccagctggatcagatccccttcaaggacatgtggcccgacgacagctactggtttccactcctgcttcagaagaagaaattccacgggtacttcaagttccagggtcaggacaccatcctggactacacactccgcgaggtggacacggtctagcgggagcccagggcagcccctgggcaggagacgtggctgctgaacagccgcaaaccatcttcacctgggggcattgagtggcgcagagccgggtttcatctggaattaactggatggaagggaaaataaagctatctagcggtggttttttttttttttttttggaga

SEQ ID NO: 1325 - DNA, 83 bp, Homo sapiens
aaggtgatgaggggcctctccatctgcaccacctgcctcctgagcatgctccaggccattaccatcagcctcagcacctcctg

SEQ ID NO: 1326 - DNA, 354 bp, Homo sapiens
gttgagtctaagaagtttgtttataacactggagtaacttcctgcttccatgcaggtagctctcagtcactgctgagtaatttaagatggaaaactcagtgagtttactcaagagaaaacatctccatgttagatcaggttgcacaaaaaaaagctttattgactcactggactctaaactccatgttcattgttttgatgaacaggaccacaccccgaggttggcctggagaaggtaaagaaatcggatctagaaagagccaagggaaggcagattggacccaaagttaacacctacgaccaggagactctggagaaaaatgaaagtgctgcctcataaagggtcaacgagaa

SEQ ID NO: 1327 - DNA, 149 bp, Homo sapiens
gatagcattgggagatatacctaatgctaggtgacgagttagtgggtgcagcgcaccagcatggcacatgcatagatatgtaactaacctgcacattgtgcacatgtaccctaaaacttaaagtataataataataaattttaaaaaaa

SEQ ID NO: 1328 - DNA, 83 bp, Homo sapiens; identical to SEQ ID NO: 1325

SEQ ID NO: 1329 - DNA, 636 bp, Homo sapiens
ataactattcttgttttatattttattatagtggaacagctcgtgtcctcggtctcttgcctcggtgcctgggtggcttgccgcccacagctaacacggtgaaaccccgtctctactaaaaatacaaaaaattagacaggcgtggtggcaggcgcctgtagtcccagctacttgggaggccgaggcaggagaatggcatgaacctgggaggcagagcttgcagtgagccaagatcacgtcactgcactccagcctgggagacagagcaagactccgtctcaaaaaaaaaaaaaaagagattcatcatctaatatacactctttatattaaatgctgcaaataacagtttgatactaatggcagttaaaatcattgtgtgcggaaacagaaagttaaccaaaaaagaagagtcaattcctcagatgtgtaaaatactgaactagaagctttagaattacaaagagaaaatagcgtcagagatgagctttgatctcaaggatcagttgggaaacattaaagaggcacctcacagtactatactttccacagtaagcgccaaatgaatgctacagacaatgagtagagcaggaacatcaaaagagattattcatagtcagaaatcagggttttttgttt

SEQ ID NO: 1330 - DNA, 101 bp, Homo sapiens
cctgtaatcccagctacttgggaggctgaggcaggagaattgcttgaatccgggaggcagaggttgcagtgagccaagatcgcgccactgcactccagcct

SEQ ID NO: 1331 - DNA, 461 bp, Homo sapiens
aagccagacacaaaagatcacatattgtatgattccatttatacggaatgtccacaataggcaaattatctgtagagtcagaaggtagattaatggttgcctagcgctgggggaggaggctgagggaaaacaggaagtgactgttcatggatatggagtttctttagggtgatgaaaatgttcaggaattactggtcatgactgcacagctctgtgaatatactaaaaacaactgagttgtaaggtgtgtgaattttatcccaataacgctgtttaaaaaaacagaagcatgggctgggtgcggtggctcccacctgtaatcctggcactttgggaggccaaggtgggcggatcacgaggtcagagatcgagaccatcctggctaacacagtgaaagcccgtctctactaaaaaatacaaaaaattagctgggtgtggtggtgggcacctgtagtcccagc

SEQ ID NO: 1332 - DNA, 101 bp, Homo sapiens
acacctgtaatcccagcactttgggaggccgaggcaggtggatcaccagaggtcaggagtttgagaccagcctggccaacatgatgaaaccccgtctctac

SEQ ID NO: 1333 - DNA, 222 bp, Homo sapiens
gccagagctcacaaatagttggaactgccctaaggatgccattttgttcttaaatataactagcaaatattactcaaagctgtgcacgatccccaaaccctggtccccaataatttgaataatctgaatatgcaagttaaggtattgagatgggaaccctcctgtgtggtatatcttgctcttatcctttgtgaagccaataaacttcaatttctactctca

SEQ ID NO: 1334 - DNA, 374 bp, Homo sapiens
gaaagcttaaatgctgacatgttacaaagtagttttgttgatagctagcaagaagcacacattttctttattctgttgaatcttcatttggatttacagttctgggcagatttggaaacggggatggtggcggcattgtttccgaaaaccagcgcatccgtgcaaagaatttaattccctcaccatcttgctactggtctgttgcagtggggtgtggttagagggctaggaagcaatccaaaacagcagctcaggctgcccaaagccgtgtccaagcgatcattttctccattttgggccaagtcaatttgcaccggcaagaggcagaatgtttgttttatggggaggaggaaaataaaaaaggaagtcagaga

SEQ ID NO: 1335 - DNA, 100 bp, Homo sapiens
ctctactaaaaatacaaaaaattagccaggcatggtggggggcgcctgtaatcccagctactcgggaggctgaggcaggagaatggtgtgaacccaggag

SEQ ID NO: 1336 - DNA, 159 bp, Homo sapiens
ttttttttttttttgatatggaatcttgctctgtcgcccaggctggagtgcagtggcgcgatctcagctcactgcaacctctgcctccagggttcaagtcattctgctgcctcagcctcccgagtagctgggattacaggtatatgccaccacgcccag

SEQ ID NO: 1337 - DNA, 159 bp, Homo sapiens; identical to SEQ ID NO: 1336

SEQ ID NO: 1338 - DNA, 6041 bp, Homo sapiens
gagccattgacactggagaatgatacctaccctgaaataactcacttcctgaggaaaaaacgccatctctagggtacagaaacctgattctgggctccttttgggaaggaggatttggagtctggtgagagcaaatgattttgcaagtataaaacaatgtccagagaggctgtagggatatctgtgagcccagaggaaacaccaggggatcctgtgcgaagcaccatggcttcagctagggtgggaggagtgggtgggcctctctctaatgacttatcctggtgtttgtgtttctaaagatttgattgtggagagcatatctgatgatggggatttgtaggtaggtaactactttccacgtaagatccaattggagagagttcccaggggccttcggggtatccatgctgcttgggaggttaagggagggggcatgaaatcaaaaggaaacaggaaatatgtgtcatattggatttggtcttttccgggtttattggcataatagttagaactgtctctctgggctatgagggtgctgtgatatttaaaggtggtctttcccagaacacctggccttttcttttctgcctctgccaaacatcacagcctttgggttggattagtcagcaccccttgggattgtgcagaagaggtttggggttgcatcgagtgtcacctgtggtgaacagaatctgagggacacaactctctcacaggcacttccttcaacctggagacagagttctcctggtgtgtgcccaggggtggaggagaaattgacagtctgcctctgaactttcaggactttaaaaagcactcatgtttccatcctcactgttgactcctggcttaaagggatctcccggggtgagtgaggaggcgggatcggaccctggcagtctgacggcagcacctgtgttcctctgcactgggccgtggatgacattacacaccttggtgagaatcaggaattgaggctaaccacatctgaaattgagatgggccttgagtcatataaatagtttggaaaagatgcattttactacgctattgaaagaaaccatttatttctcactccagcaggataaatggttttcagtatccatttaactgctcattgactcttactgtagatgaggaggtggccagcagcccctgccctcccccagttggtaggcccaaggtaaccagcaattgactggatataatggaagagtggtgcattcggaagtatctgtattaatgggacccacatgatatggatgagagctattagggtgagaaaaagcctgggagcacaatgaaatatttaaatattaaacaaaacattgttgaaatctccattgtactttagtagttgaagtcattcttgtggtcatcactgcctttcccaagcataacaagctacttaatatcacatggacccgtgccatgaggaatgatgatcagtttgtaaaatgccaataaaacaattgcctatataagccacaatgtttcatccatatatttcaatttccatgtgtaagtatagttcaaatttcagaaatttattattatctaatagaatatgcatggtatatcaatgagcaattatcatactgtttctattaacaattatttgtatgatgaaaaaagcagactcccattcttggatttttctcagtttgcacacattagcatgacagccccatttccacctgacatgtgccagcaagaggccaggaacagaggcttttcttattaactaagatttctaaatgtattacgtattcacatttagaaactctaaatatcataaaaggttagcaaggaagtttcccttccactctgaacttccaaacaccaagtcaacatttttgtttgcatatcatccctgcaatctatgtgcaaatagaagcatgcacctggaatgcaggctgatgtgtgatcgtgtttacacaaagtcctctgcacctctgcatatatcactgggcaatgcaccttagttatcattccacatttcaaatgtaaatccattgtattgtttcagagctataaagtactgcaccccatgactattcccaaaattacttaagcaccccgctatgggtatccgtttgttctgtttccagtcttgctcttataaccaatgctgtagtgaacagcactgtgttgagaagcggtgaacgtgggcatctttgtcttgttcccttcctcagggggaatgctttcaactctcccccattcaggaaaatgttggctgtgggtttgtcatagatagcttttattaccttaaggtatgtccgttctatgctgattttgacgaacggttttaatcataaagaaatgctggattttgtcaaaggctttttctgcatctattcagattatcatgtgatttttgtttttagttttattgatgtgatgtatcacatttattgacttgcgtatgttaaaccatccctgcatccctagtatgaaacccacttgaatcatggtggattatctttttgatatgctgttggattcagttagcttggttgtagcatttcttattattccatctgtggaatgtattggttgaaataatgaaaacatgttctatcctcactgcttagcactttgtgtttctttaatagccttcccaacagggcaacataaaagcaggagccctgctagtctccccttaacccggaatccccccttctccacagctcgctcattggacaggatagactgggcgcccaggcttcaaggtaaggacgtgctctgtcacctagaggtgcagtgcttgggaaggccaaccttggagggttgcctgccagctttacagtgacagaggtgttgagagggactgaccaccagtgcagaaggctgtgctttgttggtgacataaaggattgtttcacagattgttggggagggacaatcccaaggcctcccctggccctggtgctggctctgcacaaaggcaataagagagggatgctggtaagggctgacctgttgctgtgctggggaggaaggtgctgggctgaaattcaggaggctgaggatgcagcagtcccataggaggtacatgaccttcaggatacattttcttcattgatgatcaatggaaatgagaaatcactgactattttttctatcattggaatctactctccactgctcatgctgttcctgtcttttggggaagatggaggatcaatcagtgtgcgctgcactgagtggaaggaaggagaactgtgacaaaaattaaggaaggatgagagacgggagggcccttcatccagctgcttgcagagtcctcctgaggaggaaagccccgtggctccctggcgaaggagcagtgagggctgcgtgactcccacagtgaagtgtgtggtatgtctgaggacacccaggctggtggtccatgaggagccagtggcagagtgagaagaagaaaggccaggagggtggctggaggccaggctctgagtcattctccatgtgatggaaacagccggagcccagtgggcttggaggtacaggatgcggtggctgatgacagaacaatgtggagagaggcgtcatttgtcaaatccttactttgttctgggcattgtgctaaaaattctgatggctcatcccatttaggggctgaaagttgcagaggtttaggaagctcacccacgatactggagcccccatctcctgccctagtgctgtccaccttctcacccagccaccacctgtttcgggggaacacacagaagtggtaacctcttatggagaggcaagtaaattctgctgtttttgttattcacagaaaaacactggctcgtgtgggttgggaaggtgaaataccagaagtatttcatctggttatttctacccatgcaactcctataatattgaaatgcataggttagcatttttggccaatttactcagcattctgggttaaaggcttttatttattttatttatttatttatttatttttgagatggagtttcactcttgttgcccaagctggagtgcaatggtgcgatcctggttcattgcaacctccgcctcccaggttcaaactattctcctgtctcagcctcccaagtagctgagattataggcacatgccaccacactgggctaatttttttgtatttttagtagaaatgagatttcaccatgttggtcaggctggtttcgaactcctgacctcaggtgatctgccctcctcggcctcttaaagtgctgggattacaggtgtgagccaccacgcctgccctaaagtcttttaaaattcacttgtataagttgacttagttttctttaaccttgtagaaaaatacaaaaatggcaatctcttttatcacacaaataatgtctttttaatggagtgatttttttctaattgaggtattatgtacttttcttttactaattattgtttacatttgaagtgttttatgaatgaatatttaattgcatagatgaagattactagttataggcattttactaaccaatactcattaagcatagcgtggattcatatgacatcaaggagctattttatttggtaaaatgaaaaagcacaagaatgaacgaacgcaagaactgaaacagtggagacacctagaatgacttgtctaagatctaaatcattttgttgtcttcccagcgtacttattatcctgatcattgtcatcagcattgtttgggtccttttagcacagatttctcaaaatgggtaactccataacagttggaagcttacgaattcatataatttgtaagaggtcaatttggaagtacctatctatattaaaattccaataacctgggaatttcatcccatgtcaagagtcttttatgtaaaatatttccacaattaggagaaatatgtgcatggggattttctatgtagcggtgttttgatagaacagaaaattgggataaaccaaatttccatcacgaaggaaatagtaatatgctgaataataatacagcgaatattatgcaggctttaaacatcaaaaaagagttcaacttctgacttccgatgatggtgttgaagcaggtcactgctggtttacatttgattttcatgtgggaactctggaagtccgtccgccttagtgatttcacatgtggctaaattgagctaatgacaagctgttcgaagtatggcaaaatggaactttaaaacagtatcttgtcaacaaccaagaggacctttttcacataaagcccacgcattcatctgcctgtccatcattctgtctgtccacacgggcatcattcgttagtggaactgagtgcccactgtcgagctgacaagcccataacctccctgttcctagtcacacattaattcttcaacaagtcccttttgatagattgtgattaagcttagctactatttccaattgcttccccaaacgtacttctcactgttctcccatcacacccttcagcccatccatgcggggttcctttgcttttcccaccttacaccaaactccctatttttactcccactttgacctcctctccaagacaaaacaaacaaaattagcattttaaaacttagttgtaatctttcttccttcatgaaaatttctccaacagccactcccacggtcctgtgtgttccggatattttaaaataatggctataaggttgagcacttcaggatacgctgttttgctgtgtgcagatggaggcagtggctggagtgaatgaacggcaacacttgctggcaaccggcagaagctgagagacagggaacaggctctcctccagagcctccaggagccaggcctttggacaccttgaatgtgggcttctgggagaccatgcgtttctgttataagcagcccagtctctggcagtttttacggctgccccggaacactcatctatacctgtctgacaaggtcaagctccaaggaagggactctctacatatctacattgtttgcagattttacaataatcatttattcttgcatggctgatcattgttaaccaatacaaataaaataataaagaaatgacccacatttta

SEQ ID NO: 1339 - DNA, 656 bp, Homo sapiens
ttccatttatgcagccaacagacacgtgaaaaaatgctcatcatcactggccatcagagaaatgcaaatcaaaaccactatgagataccatctgacacctgttagaatggcaatcattcaaaagtcaggaaacaacaggtgctggagaggatgtggagaaataggaacacttttatactgttggtgggagtgtaaactagttcaaccattgtggaagacagtatggcgattcctcaaggatctagaactagaaataccatttgaaccagccatcctattactgggtatatacccaaaggatcataaatcatgctactgtaaagacacacacacatgtatgtttattgcagcactattcacaatagcaaagacttggaatcaacccaaatgtccatcagtgatagactggattaagaaaatgtggcacatatacaccatggaatactatgcagccataaaaaaggatgagttcatgtcctttgtagaaacatggatggagctggaaaccatcattctgagcaaactatcacaaggacagaaaaccaaacaccgcatgttctcactcataggtgggaattgaacaatgagaacacttggacacagggtggggaacatcacacactggggcctgtcctggggtcggggaaggggggagg

SEQ ID NO: 1340 - DNA, 413 bp, Homo sapiens
tagggaggtagcaccgcatggaagctgaaaacagtgacagagaaaactacccagaccaggcgttgtccttgatcccttcaggaacatcactgggcaatgtgaggcacagagagagctagaaagtgtttgggggctgatttgtttttcctgagacgaggtctcgctctgtgacccacgccgaagtgcagtggagccaacatggctcactgcaacctcgaccgcctgggcccaagcgatcctccttcctcaacctcctaaagtgctgggattacaggcatgagccactgcagccagcttggtggctgatttttaaaaatttattggctagttgatggatttgtctgtatatgctatatgttctctatattatctgtcacacttccaaagtataccagctcattctctcccttcac

SEQ ID NO: 1341 - DNA, 1829 bp, Homo sapiens
taacatttcgacctgttaaataaaatgggaagccacacttcataccaataaaagtagatactgaataaattaaaagtttgatgagaaacaggatatttacacagtttcaaagtactctcccacaaaatacatattattaattaccattattacatacatgtgatacaggttcattctgcccgcatgccataaatccatcactgtgacaggttttgtaaaagagaaaagatttattcgcaaggcagcccagtgaggaggcaggagaacagctctcaaatcttcctccccaaagataagtcttagggatatttaccggtgagagaagcagggtggtgtaaggtatgggcaaaggtgattggcagtgggggaaaatgaggcagtcggtgaccactgcaagcatagtcagggttcgtggcacttcacagggcacatgttcaaaaaatgacagccttagcgtgatctgagggtgtcgcttggggcctctgatgtcaaaaggccacttcttttgtttgcacaagcctacttgaaagctcacggtctcaactggtttgaactaggcaggagctgccccaagttcctgaaaaacaatttgaacgatcatgacagtagtgacatacatgttatctgtaaggaagccggcaaggttaagttacagcgctcagtggcgcggccttcagcttcacagaaaaaaaataacaaaagcaagtgacccaaagcaagcagggcaggctaaattgggcagacctaatcagatgaaccccatggtctcatatgtaatattacattataactataaagaatgtaattaatgtaaatattcggtacaagaaagtcatcagtgcggggaacactggaattgcgtgccaccagaggacagagtggagccagcgcggtatcacttctgtgctgttcccatcgaaggtcagtaaccggaaccccttcgccaggacgcgggtcctggccaacccaaatcgaggggcattctgcagatcagctggtctgccatcttcaaacgattcatgaaaatcaaagacagctttgaggaacggctccagactggcagagaccaaagaggtcatagatgaacaggagatccccaactggatcctttggctgtaaaggacaatattggcacaacgggtgaagcttgaatggggtctgaggattaggtggtagtaacttcacaggcggggatttgggagaaatgcaatgtcacgtggaaaactgactctcaaatagttcaagaaggaagttctttggactatacttgcaacttttctgtaggcttaatactgtttcacaattttaaaatgtaaaataatagtaccaggtagtagttttttattaagacagattgtgctttttgaaagcattggtggaaagatttctcaaaatcatgcgcgaaagagtttataatgaaattgtgtaatatttgtttcaaaagaaagtgtgggccctgagaagcattttctgtagtttacacagtatttctgccaatttgggatactttcagtgtccctggaattctcatcatctgaatttcttactctttttccctttaaaaaaaaataaaataaagaagtatgaggcaaaaggccacacctacctacctcactttaaaattctgtctaaaaacctggtcacagaggaagatgttggctaactttaatgcgataatctagttcccctcaaaatggaaagctatttagaaaaaagctatttgcccaacgtgaggaacaatttatagaaactgacaagaatttttgtcctggggaaaggacagggtttgttgcatgggataaggggaagtgatgtggccgggcatgatg

SEQ ID NO: 1342 - DNA, 300 bp, Homo sapiens
ttgttggggtttatgttactgaagaatgaacagagatgagtaagtggaggtgttatgtaaaggcatactgtactcaaaatctgaagacctgcagcagatttaaattccagctcttattataactttttaaaagattgtgaaaatatcaaaatatagatgaatcaagttttaatatactgtatgatgggtggatgaggctgtccattgtaccatttgtttgaattctcaggcatggtttggcagtgcaagaactctgtaacgttaacaaattcaataaaaagtaaatatatggaaaaaaaa

SEQ ID NO: 1343 - DNA, 168 bp, Homo sapiens
tatatatatatatatatttattatactttaagttctagagtacatgtgcacaatgtgcaggtttgttacatatgtatacatgtgccatgttggtgtgctgcacccattaactcgtcatttacattaggtacatctcctaaagctatccctccccctccccacacccca

SEQ ID NO: 1344 - DNA, 83 bp, Homo sapiens
aaggtgatgaggggcctctccatctgcaccacctgcctcctgagcatgttccaggccattaccatcagccccagcacctcctg

SEQ ID NO: 1345 - DNA, 83 bp, Homo sapiens; identical to SEQ ID NO: 1344

SEQ ID NO: 1346 - DNA, 279 bp, Homo sapiens
caaatcacatgtgaggcatccaagaaatccctttgaattaggtttgatcaaagtggaaggcattatttaaagcagagcctgccccgcaagagtggttaacctgaatggtttagacaggaggttgacaaactttatctgtaaaacaccagagtaaacactttaggttttatctgccatagtcccaactactcaactttgtccttgtaatcaaaagcagccacagagagtttgcaaatgagtgggtgtggccatattccaatacaattttatttacaaaaa

SEQ ID NO: 1347 - DNA, 471 bp, Homo sapiens
ctacaaaacccatagtctttgcactacaacacaagcaaagacgagtcctctgccaacccacatggcagcttggtgcaaattggaaatggggccttttctgcccagggacctcagggcacagagcctggcaactcagtcaatggccagtttctgccctcgactaacccccttggctgggcccctcatgaaaggccttgcaccactgcacaccctcgccctgttcacagaggtagcaaagcacctgcacgtagtcactggtgtgtttccaggttcccctggcatgagacacacacctatgaaatggcaactgtgatcagaggcatagcgagggtcctggagcagagtaaatctaaacatcttcaaaggagctgagccatgatgttggtctcactgagaaaagtggaaggaggaacatttagttttatcctgtggggctgatacccaaaacctgtcatgtacagactattccgt

SEQ ID NO: 1348 - DNA, 232 bp, Homo sapiens
cgggtgtggtggctcacacctgtaatcccaacactttgggaggccgaggcgggcggatcacgaggtcaggagattgagaccgtcctggctaacacggtgaaaccccgtctctaataaaaaatacaaaaaattagccgggcatggtggtgggtgcctgtagtcccagctactcgggaggctgaggcaggagaatggcatgaacccgggaggcggagcttgcagtgagcagaga

SEQ ID NO: 1349 - DNA, 6150 bp, Homo sapiens
aaagtagagaaaacagtgtaatgaaccactacatattcatcaccctgcttcaaaaatactcaacatttaggcctggtgcggtggctcaagcctgtaatcccagcactttgagaggccgaggcaggcggatcacctgaggtcaagagtttgagacaagcctggccaacatggtgaaaccccatctctactaaaaatacaaaaactagccaggcgtggtggccggcacctgtaatcccagctacttgggaggctgaggcaggagaattgcttgaacccaggaggcggaggttgcagcgagccgagatcctgccattgcactccagcctgggtgacaagagcaagactctgtctcaaacattttgtcagcctttttcatctatctgccccctcctctttttttgcactagagctgggattggcaaactgtaaccccatagaccacatccaacctgctgcctgtgttttaaaaattgagatataattaatataacacatcataaaactcactctcttaaaatatacaattcagtggtttttagcattttacaacattgtgcaaccatcaccattatctaattccagggcattatcatcaccccagaagaaaccccacacccattagcagtcactcattctccccttccaccagccccgggcaaccactaatcaactttgtctctctggctttatctactctggatatttcatgtaaatggaattatacaatatgtggcttttggtgtctggcttctttcacttagcttaatgttttcaaggttcatctatgttgtagaatgcaccagtactttgttccttttcatggttgaccatttcacattttgtttgttcattcatcagttggacagttgggttgtttccacatacattttcaattctactgggtatgcacctaggagtggaattgctaggtcatatggtgactattgtttagctttttgaggaactgccaaactatttcccaaagtggccacaccactttacatttccatcagcaatgtataagggttccggtttctccaaattcttgtcaatatttgttattgtttatctttttgattctatccatcttagtggatgtgaaatggcatctcattgtgtttatttgcatttccctaatgactaaagaggctgagcatcttttcatgtgcttattggtcatatgtataccttctttggagaaatgcctattcaaatcttttgtccagttttcaattgggttattattatttttgaggcagagtctcgctctgttgcccatgctggagtgcagtggtgggttcttggctcactgcaacctccacctcctgggttcaagtgattctcgtgtgtagtctccagagtagctgggattacaggtgtaccccagcaagcccagctaatttttgtattttaagtagatacagggtttcgccatgttggcctggctggtcttgaactctacccaggcctcccaaagtgctgggattaccggtgtgagctaccgtgcctagcctatttttttcaactattaagttgtaagaattctttatatgttctggatactagactcttttcagataagtgatatgcaaatatttccttccatcctatgggctgtgttttcactttctatcttgaaatagtcctttaaagcacaaagtttcaaattttaattattttttctttcattgcttgtgctttaggtggcatatctaagaaaccattgcctaatccaagatcatgaagatttacatgtgttttcttatgagttttatattttagctcttacaattagttcttatgcatctgaatttttaaaaaacttatgtacttctaaggtacaactaattttagaaagtaagagtgagtagattttgatggcctccaagagtttagaaaaaggtatgagctttgatgcacaattttacccaacatatatatgttggatgattggaactttttttggtctactttagggttttttgctcttttgcagcagacagctgggttgtccagagagctgattctggaaaggtgtatattactatttaggtaaatggtcagcttctagtatcagcaaaataaaatactccaaacatgtttaggaggagccccttacagtcccaagtttaaaaacacagactgttattttaagacattttctatgtatagagccccacagttctaacacaggtatttggaaatgtagagaaaaggaagcaaaaatcagcagctgggacttagtttccaaccaagggaggatggcatggatggctgcacttctttcatttgcagacataaccacaaaccatcagttgctggttgacagtttgttctggagatgtgaggccagtggttcttaaacttgagcgagcattagaatcacctggagagtttataaaaacccagattcctgacccccatctgcagagattctgctacaggaggctggggtggggccattaatttgcatttctaataggcttccagatgctgctggccctaagaccacactctgagtagcactactttagatacatgggccaaccatctcgccctggtgcttaccaaacattgaccaagcaaacatgaagctaggtgactctccttggggatgaatatgataataatctactgagaaattcaagaggctgtaagtatcccaatttcattaaaatttctaaccattggtgatgtcatttcaggttccaggcttatgctctttttcttcttcttttttcttttttttttaatttttttatttttgagacagttttgctctgtcacctaggctggagtgcagtggggcaatatgagctcactgcttcctctgcctcccgggttcaaatgattatcctgcctcagcctcccagatagctgggattacgggcacatgccaccacacctggctaacttttgtatttttagtagagacagagtttcgccatgttagccaggctggtctcgaactcctgacctcagatgatacacccacctcagcctcccaacgtgctgggattacaggtgtgagccactgcgcccagctggcttatgctctttttctaaaaatttgtccacttaggaaagtgtcttgatttcaataaaattagcatggattaaattactttttttcttttttttttttcttttggtatttgatcttgctcgatgaatgtggacatcagctatgggttaggaatgctattcaggaacatctaatgtgtttgtgataatgtatttgacttgtggccaaatggtactcttgagagatgtggttgtgactttgacagattaagccaaagttaaattctgatgaagtgcaaaggaattttatcggtcccaggatggttgccaactgtgttgggcaaaagagtgattttccaaaaaggtccagagcaatccgcatgtattctgtcacctctacttccagtttcttcaaaggccagccaaaagcttcattttcctacttcctgtcatttccaaaaccacagcttaaacctgaaaaacaaatgggaagctgtgttcctgcctcttatgattgctgccacttacaaaccagcaagaacagagcacagcaagcagaggagagttcagtcttgctgatgtcacatgaagcagaatgaggactctgcttgtttggctcctgagtttaaaagataagtagacaatttattgttggtaggttgagaaaattcaagaacagagagaaatctgacagtctggccataagaagaaatttttgcatttatgttcttatagccatacctgaagtcaactaattacgtttggagagaagtagaatgcttgctttaagaagaaaaaacaggctagggcgcggtggcacacacctgtaatcccagcactttgggaggccgaggcgggcagatcatgaggtcaggagatcaagaccatcctggctagcatggtgaaaccctgtctctactaaaaatacaaaaaattagccgggcgtggtggtgggcacctgtggtcccagctgctcgggtggctgaggcaggaaaatggcatgaacccgggaggcagaggttgcagtgagccgaggtcgcgccactgcactccagcctgggtgacagagcgagactctgtctcaaaaaaaaaaaaaaaaaaagaaaagaaaaaacaaatgttctatgttgaccctatccccaacacccttgcagcaggtctattgtaccttaagctgtgctctaacttcattagcaggctctaggcctctctcccagagatcacccatgggagggatccagcttccttcactcagcagctcttacactgctcccaggaggaaggaagcattttgttttaaagagactgcaacacaacccaaaggaaagacagttatcttagtgtccatatgtccacaagaggaaaatgtgggtgtagcattttaatcccagtaagtgacaattagtcactaggcttctaagaagtttgacactgttattcctctcccccttttctaaattgcaagggtaatactgcatttgcacagaaaccatgctaactggctagctacttcattaaattaccatatgattcttattttatgggtacaaaacagttgatctcagtgaaccggcaacttagaaacttaggaggcaaattagagcaattactaataaattatacatgtggtaactaacaatttgtctatcacctagaaatatgagaaaaaactgccagactccctggctctgcaattctgaacaagtcttttcatttttttcttttccaagaccaaaagctgtcattatccacaccagttataccattactcttgctgctttcacagagtccaacatttataatacaaagttaggagtacaacgagtgggatttgcattctgtttggaacagagtgtttgactgcttaaaattaaagaactaaaaaaaaaaaaaaaaaaaaattcccagaacctcaaatcaccccctaaaaaccaggaagtgagattcatgttagctttccctaagtaagtttatggaagagataatggcaagaggtaggggcaaagtatctgttcattcataatcactactgtgcttcgtttctgggcaaggtagtctgatgaaattaaaggaagttctgtgttacaagtcatgtgcttttatgggggaggaggtgagatgaggtcaattaacaagatatgatctttctcttctctccctgcttgtctcacccaggcctcgggtgtgccattcaacatgaaaggtgttgatgccattcattaattgagggtcagattcctctatcagcatattcctcccatctgagactgccttacctccatccacttccacccccaacaggtttcattttctgcagctgctgtcaagagctacgtggaggaagagagtggttttaacaactgcatgctcaaatttattctcactggcctcttgtttgaaggaagtccaatgtctagaccctggatgttgaaacaggatgtaaaaaaaacaccaaaaaaaccctgtatatttgagagagttttgaaacccatcccaaatacactccagcaatggagaaaaatttgattttggcataatttatataccacatttctccccgtacccaacaaaagtgtatgctaatgtctctatatcacatgatatatcagtttaaaatattctttctctttgcctttgttcgtagtctcatttccacttttacttaaaattttaatatcttctccccaggttctttatttatttttgctatatgcctgaatataagacctaattccatgtcaccaatatctcccttgagaagcactgatgttaagtagaataaaatgtaatcaacactcattgtttcctaccaggacaacagtagggtttaaaacaaaaccaacctcgttatgaattccaaacgcccttctaaataactctgggtgccatttcacaacctgacctgcatagttcctttaggctgctgtgggagttgtgactatcctgtgtccacgtttgcatgctaggttgcactaacccagtaaacacattctgtatcagcctgcagtttgtggaggtccgagcacaacgcatggaattccacctctctggggttcctgccaggtggagcaatccagaagtatagcttccacctgtaggggaggcgcctgcaaacctggcagctct

SEQ ID NO: 1350 - DNA, 114 bp, Homo sapiens
ttttttgtatttttagtagagatggggtttcaccgtgtcagccaggatggtctcgatctcctgacttcatgatctgcccgccttggcctcccaaagtgctgggattacaggcgt

SEQ ID NO: 1351 - DNA, 327 bp, Homo sapiens
tttgcagtagtgtgtcttattttcagtctatatgaaaacctacaacagtaacttaaatattgtagaacatgtattaaggtattaaggtttttcccagctgacttaataagttaatttgaattaatggtgtatgattttgaatacaagttcgaagaccttgggtgctgtgtgtgatgtcattgagctggctgtgaaagatgtgagacaatgagtgtcttcttgtatcgcatggtaagaccataaccgtattgtaacactccaccacgggcctcctctcaggggaaagggggattacttcaggttgggccaccgctctgacgtgcacgt

SEQ ID NO: 1352 - DNA, 413 bp, Homo sapiens; identical to SEQ ID NO: 1340

SEQ ID NO: 1353 - DNA, 232 bp, Homo sapiens
tttttattttattttatttttttgagacagagtctcgctctgtcacccaggctggagtgcagtggcaccatctcggctcactgcaacctccacctcctgggttcaatcgattcccctgcctcagcctcccgagtagctgggattacaggggcctgccaccacacctggctaatttttgcatttttagtagagatggggtttcaccatgttggccaggctggtctcgaactcc

SEQ ID NO: 1354 - DNA, 327 bp, Homo sapiens
tttgcagtagtgtgtcttattttcagtctatatgaaaacctacaacagtaacttaaatattgtagaacatgtattaagatattaaggtttttcccagctgacttaataagttaatttgaattaatggtgtatgattttgaatacaagttcgaagaccttgggtgctgtgtgtgatgtcattgagctggctgtgaaagatgtgagacaatgagtgtcttcttgtatcgcatggtaagaccataaccgtattgtaacactccaccacgggcctcctctcaggggaaagggggattacttcaggttgggccaccgctctgacgtgcacgt

SEQ ID NO: 1355 - DNA, 84 bp, Homo sapiens
ggtggccggtgcttgtaatcccagctacttgggaggctgaggcaggagaatcgcttgaacccgggaggcggaggttgcagtgag

SEQ ID NO: 1356 - DNA, 510 bp, Homo sapiens
cccacctggttctgtttgctagcgtttactcttatttcaagtgtctttttgggatttttcaaccttggacgtttccatgtcctgcactgtgaagagaccctatagcagctttcctagcaattgtcagcacaccaactgcacccttcccctggaggaaacaggccaccttgccaggctcctgaggccccattcccaagaaggcaggtcaggttaaactagcagcgaccctaggcccttttctctgggtgccagaggtcattttcttttgagctgagggataatcaggctaaccaaaacagtccaggttaagccctgcccaatccaactggcaaaggtgctgggagtaaagagaaacaccctggaatttgagcaaagtcagatctaaggggccatgggaggctgacagcttggtttttggtcctgggaagtacagcagcctggctgggcccagtggggaggagctcctggccagcagccaggaccagcactgggaggctgggcgccaccctg

SEQ ID NO: 1357 - DNA, 5131 bp, Homo sapiens
atgaagaactgtgaaccatttgtatccttccctctgttggccattgacaagagaaattctttgttgtgtttaacagcgaaactctcgtctatagagaagtaaagttttcagttacattatagatataacctccaaaaaaatttcatcttcacttctattcatatctgatgtattatttagtgccacacacaacttacttagataataaagttaggttatgaaagaagagaatcaaatatgaatcaatttcccctctcatctttttttttgagatggagtctcgctctgttgcccaggctggagtgcagtggcccaatctcggctcactgttaagctccacctcctgggttcacgccattctcctgcctcagcctcctgagtagctgggactacaggcgcccatcaccacgcccagctaatttttgtatttttagtagagacggcatttcaccgtgttagccaggatggtctcaatttcctgacatcgtgatccgcccgcctcggcctcccaaagtgctgggattacaggcatgagccaccgtgcccagcctcccctctcatctttttaagattcaaatattattaattttctattatttgcttataaaacccaaatattatctcaatccccttcctttccatttatatttgtccttcacaatttttggaaaagataacaccactttatttaaataaaaaaatgaaactatctttaaaaagcaagaaacagctgagcacagtagtgtggctgtagtcctagctactcagcaggttgaagcaggaggatcactggagctcaggagcttgaacctaaagtgcactatgatcacacccatgaaaagccactgcattccagcccgggcaacacagtgagatcccatctcttaaaaaaaagagtgagacagtccagattagattcttttacatttcatctgtttcatttctgagcacacagagtattatttagtctggactcattaacttaacctctgccatagcatcacttaccgcaaaaggaggaatttgttttccaatcttgggttagaatattaagaacaaatcatgtagaatgggaaacaaaatgctactaaatgttaaaagtgaaggatgaaaaatattaaattatttccacattaaatatgcttatagaccattttccaaatggtcttcacatcaacaaaaaaattccagcaagaaaacttaaatttttggaaaatattatagtcaaattttagaatatcaaagattttttaaaaatgttcatagaaaaaatgacctaaaatttggatgttgtaagaaatattgctgaatctcctttaataaaagttaagattgacctacggaagttcctattctatcattaaaattctaagaattaagtacagatcattgaaaccctttcaaatcatgttgtaaaaatgtcctaagaagaaaaaatacccatctgtataaaaagcaattttttttaccagaaaattaaccttcagattagttgaaggcagctagacattagtataccctttaatgaataatgttattgattccatagagaataaaatagaataaaagacaaaatatttaaaacataatataaatgtaaacatttttaccttcaaaaaatcctccatagatagattcccctcctcgtccatttcctaaaaatgaaaaacatactcttataactctcagtaagctcctcaaaggtgatacctaaacacaatacttcttgtaaagtagatttttgaataattttgaattaacaatattcgaagattgcagcaaatcataaaagatattaatgtcaataacgacaaggtcccaaattactttctttcccctatgctatgatagcaagaatgtgacgaagactattaaaatatattttaaaaaagaactttcagattctaattatgattatgcaggtcttgcaacaggttaacattttttcaaagttttttaaaactatagttttgatatttttacaataaaaaagtaaaaatttttattgtagtaaggattaccacttgtgacaaaatcaaacagaaacacttgacagattactgagatgaatgcagtgttgttttgtatccagaagcctatttctgaaattcatgtgtcaaaggcaaaattattttctatgagcttccttcttttttttttttttttttttttttttgagacagagtcttgctctgtcattcaggccggagtgcagtggcacaatctcagctcaccgcaacttccacctttcgggttcaagccattctcctgcctcagcctctcaagtagctgggactacagccacgtgccatcatgcccagcaaatttttctatttttagtagaggcagggtttcaccatgttggccaggctggtctcgaactactgacctcgtgatccgcccacctcggcctcccaaagtgctgggattacaggcgtgagccaccgcacccagcctatgagcttccttcttttacatatttctatgagtacttctaattgaccaaagattaaatggagtgagagtgacaagaatattggactaaaacttctagggacttgtctaactttgagatctgtgatatttaacagaaaataatacatgatttttccaagtctcaccttcactgaagtcaccaccttgaaccataaaatccttgacaactctgtgaaagagacaactcttataatgtaatggtttctgagttgatttcccggtccccttttcacctatagagataaaaaaataggacatttaatagaaaggaaatcaaagtagtatgaaagcaaaataaatgtaaaatatgcccctcttgaaccctgcagacttaaaatcatattttcattcctttcaggaatttttttttaaaaattcatttaaaaaatcacccacgttatttctggagaatgtagaaatcactctcaaataatatacctttacaactaatgtttggttttaggtttttttttgagacagagtctagctctgtcacccaggctacagtgcggtggcacgatcttggctcactgcaacctccgcctcctgggttcaagtgattctcctgcctcagcctcctgagtggctgggattacaggcacctgtcaccacacccggctaatttttttttttagtagagactgaatttcaccatgttggccaggctggtctcaaaattcctgacctcaagtgatccacccacctcggcctcccaaactgctgggattacaggcatgggccaccacacttggcctctatttttttaattgagacaggatctcactcttgtcgcccaggctggagtgcagtggagtgatcttggctcactgccacctccgcctcctgggctcaagcgaatctcccgcctcatcctccagagtagctgggactacaggcacacaccaccatacccagctgattttttgttatttatttttttgagacagagtttcactcttgttgcccaggctggagagcaatggtgcgatcttggctcactgcaacctccatctagggttcaagtgattctcctgtctgagcctcccgagtagctgggattacaggcacccactaccacgcctggctaatttttattttttcagtagagatgaggtttcactatgtttgccaggctggtctcaagctcctgacatcaggtgatctgcctgccttggccttccaaagtgctggggttacaggcgtgagccaccacgcctggccgattatttgcatttttagtagagatggggtttcaccatgttggacaggattgtcttgaactactgacctcaagtgatccacccacctcggccccccaaagtgctgggattacaggtgtgagccaccatgcccagccacaccgtgcccagccataatatttctttctttttttttttttagatggagtctcgctcttctagctcaggctggagtgcaatggcacgatctcggctcaccgcaacctctgcctctcgggttcaagtgattctccttcctcagcctcccaaatagctgggactacaggcgtgcgccaccacatttggctaatttttgtatttttagtagagatggggtttcaccatcttggccaggctcgtctggaactcctgacctcgtgagccacccccctcggcctcccagagtgctgggattacagacatgagccactgcgcctggctgcccagccataatatttctaagaattactttcacgccctagtcactgctgtgtaatcttcatgttaagagaaaagtaatatgcatggagaaatctaaaatagagtaaataaaaaattaaagcaagctatgccaggtgtggtagctcacacctgtatcccagctgaggacgcttatgtgtaaggattgatgagcccaggagttctagtccagttggacaacgttgcaagatcctgtctcaaaaaaaaaaaaaaaaaaaaaaaaacccaggcaagcaagcaagccagccatagtcaactgagactactattagggcagttgaaaatgtgaacaaacctgtacaaagacaacgaaagttctcgcatgttttggggcacacatcagaaaataattcaaagacaactcttccagctgaaaaagaaggtagttggttaaacttctttactaatttaaaatattaaacacccatttataaatgtcaactaatattcttaccaggttgattgttaatggcaatgtcaaaaaaacatcgaggacgttgaacctttattcccatggctccaatacttaatctgtgagtaaaatacagtttcagacaagcagactaaaatagcaaagatctttcacaaatttctggaaaaaaaattctgtgaaacaatattagaaatatagtttgaatttattttgatatttatttctatgaggtaaatcacatggattattagtgctttctttttagagattagattgcattttgtgaagcaattagaaaagacttgaaagttaagccttaaccattattatgtaatcaactttctatttatcaaccggaatacagattaatagctcaaacagaaaattgtatttactctgtatgattagtgaactcaataagcagattaccttcaaatgaagaaaagaccaaaaaaaaacaaggacaactgatccctgtgctcct

SEQ ID NO: 1358 - DNA, 554 bp, Homo sapiens
aataagaatgatctctataaactgttatggagtattttaaggatatactgttaagtgaagagtgaaacagtatacatggtatgccatctacggtgtaagaaagggaaagtgagaaaatgtatacatgtatttgcttatgtttacaaacagaaatacaggaagataaactggaaattaggttggttattaacatgtatagatggaactggggtgaaaaaaaaaaggaaatgggaatggagtggaagggttgggtgggagagacacttcacagtattctttttgttttgactttggaaatgttactatttcataaacttaaaaaaatgcaaaaaaaaaatatcaaaactaggtaggaaggagaacaaaatgaaatataaccagaaaggaataaacctaacacattttgagtgaatcacaaagccaaaccaaaaaagaactaatttaagtcacttttaaacttggtgtttaactacctacactcagtctaaaaacgaaaataaggataaagaaatagtgaactctagttagttggtctttctttacagcagtatggg

SEQ ID NO: 1359 - DNA, 456 bp, Homo sapiens
taaagaggcagaataaacatttggtgccacatgacccctcagaagcatttgccagcttcagtgctaggactgaaaacctgaacaaaaagctgaggttgagcagctaagcagagttttcaatagatgtcagaggcgggggtcacaaaaacgggagttcagggatgacagaccctggtaaacatcccaggcttttggttggaaccacccttcttaccccctaaaaaccccaactttttaccctaggtgtatggtgaacctaaaaattttcctgaaatccagccctcacaaaacacaaaaacttagttttgaattggctgaaatagattaaagtgattcacccttgctcttaaatgcttgtcagaagcaaaactaaatcctctctagaggaaggtaacattcacagcctcagcctatctccacagttttgtgcatgcaagattaacattcagtcaaaaa

SEQ ID NO: 1360 - DNA, 157 bp, Homo sapiens
ttttttttttttttttttttgaggcagagtctcgctctgtcgtgcaggctggagtgcagtggcgcaatctcggctcactgcaagctctgcctcccaggttcataccattcttctgcctcagcctcctgggtagctgggactacaggcgcccgccacc

SEQ ID NO: 1361 - DNA, 5158 bp, Homo sapiens
ttagagagagggtctcactatgttgccatggctggtcttgaactcctgggctcaagcaatcctcccgcctcagcctcctgagttgctgagattataggcatgagccactgcacccatggtgcctaatttctgcctgatatgctgttggctcttggatccctggccaggacaggacatggaacatgggtaagggccacagacccagcagggctgctctcgaacccagtcttgcttttgcagaaagagccccctgagaaggcctgcatgaggcaactgagtgaaacagaggcaaagcaaggaagagagaagaggtcaagccttaccaagggcacagagccaactgcccagagcaagtgaagtcagagagatgggaatccccaggccaggagccaagtttcctctaggagggacaagggagctattgccaggccatgaaggttgatcagaagcttcaggcaaggattattatttattttattattatttttgtctgtagggggcaggtatggaagctgaggccacatttccatgagtcctacttcccacctgagtctgagggccccctgctggtagaacaagttggtccataggggaaacccctcggggcctgtccttccccaaggctggggcgcttcttggggagctgactgtagggctggtgctgagctccccacctcccacaggggttgtcttcgctttctccacgggtaggtctgcctagacaggcctggctggcagcgctcccggctggggaaatggtatctctttgtatctgagggcctggggcaggctgacagcccaagggattgggtgtcagcagcatgggctgccttgcccagcctgagatgctcaggcctgcaggtaccttggggcagaaagccaggcttctcatcctggattggagacaggtttcgactcctggcgcagaatcagaaaagaccccagcctcacaggctagaacaaaaatccagccccagtttgcctggggatgacagcagtgacccctaaggtgggcagcactttgctgtcagttcttcacaacgtttgttgtttgttgtcttttgtttttgttcttgtttttttttttgaaacggagcctccctctgtcacccaggctggagtgtagcagcgcgatcttggctcactgcaacctctgctttccaggttcaagtgattctcctgccttaacctcccaagtagctgggattacgggcacccaccaccatgcccagctaatttttatattttttgtagagacggagtttcaccatgttggccaggatggtctcgaactcctgacctcaagtgatccacccgtatcaatctcccaaagtgatcggattacaggtataagcctctgcgtccggccaacaacgtttgtttttttgttttgtttttcagacagggtattactctgtcactgaggctggagtgcagtggcacaatcacggctcactacagcctcagcctcccaaggctcatatgatcctctcacctcagcctcctgagtagctgggactacaggcatgggccaccatgcccggctaatttttgtattttttgcaaagatgcagccttgtttatgctgcccaggctagtctcgaactcctggcctcaagagattgacctgcctcagcctcccgaagtgctgggattacaggtgtgagccactgcacccagcccatgtttccttaaatgcacaattcataggacacttcatggggactgtcccgttaagccttacaacaaggatcctcattttagatggggactctgaggcttaaggcagatccagggttaaaccttgcttgaatttatactcagaaaaggcagaatacagagaaaacccagagttttgagtcccacaggctggacaagttacagggtaatcataccaacactgacaaactgtcagaagcaatacatgatataaggatatatacatgacctggcacatggcaggtattcagcaaaactcattttctgccccttctcctttcccttcactgagcagaagccatctcccccttgggttcagcgtggccccagctccccttcagcctgaaagctactggaaaaacgtctggaacctgtcctgctggctgaggcagaggtggctggagggacctcaggctattgtccctgcagttcacagagccaaaatgctgaaacagaagaaactcagccatcagctgaactccttatttgacagacaggaacccaggggccagagagggctcgaggggctcacggctcctcagatgttgaaacagggccagtacactggaagctcagcaggcagtcatgcgccccctccctgatgctctgaagctctcctctgagttcttgctcccctagctggtgggaggagaggggcagcccagtaggtgggcctgtcttctccacagacactgtattctaggggagatgacctccagggcaggaggcccgaagggtcctagcggggacaagctgaggccgctccttttggcgggcaggctggggagtaggctctccgtgctgggtggtgagtcactccctagcatggccaggcccaaactcaaagctcagcattctgggaggtgtgcacgtccacgtgaacgggggtggcgaaaacagactgaggaagtggcgatggggctggcttgggcagattagctgtggccattcccacagaatctctgccacttcctcttgtgtccccagcttgtcaagcccagtgagtccccttctttctcctgcctgggacctacagaagggccaaggcttctccactctctggggtgccacagcaggtggccctggctcctgaggtgacaatggtgagccctctcatctccatggaatggaaaactttccttaagctgggtgtggtggtgcatgcctgtaatcccaacactttgggaggctgaggcaggtggattgcttgagcccaggagtttgagaccagcctaggaaacatggcaagacgctgtctctacaaaaaatacaaaaattaggtgggcacggtggcgggtgtctgtggtcccatctacttgggaggctgaggtgggaggatggctcaaggttgcagtgagcctagatggcaccattgcactccagcctgggcaacagagagagaccgtgtcttaaaaaaaaaaaaaaaaaaggctgggcacagtggctcatgcctgtaatcccagcactttgggaggccgagatgggcgaggtcaggagatcgagaccatcctggctaacacaatgaaaccctgtctctactaaaaaaatacaaaaaaattatccgggcatggtggcaggcacctgtagtcccagttactcaggaggctgaggcatgagaatgcgttcacccgggaggcggagcttgcagtgagctgagatcacaccactgcactccagcctggatgacagagccagactccgtctcaaaaaaaaaaaaaaaaggaaaccttcctcagtagatcttcagtgtccaggaagaaggtacggcagggatcaccaagtccattttacagatgagaaaactgaggctcacagaggtccagtggctcatctattcctcaggtcccaagcctcatgaacttcccactctactacactgtcctcctgagttaaggcttccacaagctggcccaacaacccctttgaagcaattatcccatgccagttcatggaacccaagggtggtggggcagctgccaagggcaaacattggagctggcacagaaaggacacagaagaagagcaaacacctcttctctagtagaggcctagtggtttccaggcttcctgccaccttcttggcagggtccctggcctgggcatgaaaggaagtcaggctcatatccctgcctggctgggagggccctacagcctgcagaacttaggaggggagctgagccttacttagtgagcatctacttgaccctggctctattaattaattatttattattattatttgtagagaacgaggtctccctatgttgtccaggctgatcttgaactcctgggctcaaatgatcatcccacctcagcctccagtctgggattacaagctggagccacagtgcccagctgaccccggctcttcatatgtagaacctcagttggattcaggagactggggttctgaaatgagtacctgtggatggggcactggctcacgtagacagaaatggcttggcctaaagaagatgatcgacagaaggtgctagtgaggaggttttgagaaaacagccagggaaagaagaagccacttcacagggaggggccccctgccaggacccagggatggggccgcagagaggaaagctgacctgccgccccagcacagcaggcagcacgtgctcagatgtgcttcctcatccactgcctttcatcctcccaagaacctgggaagggaaacatcactcttgtcacaggccaagaaactgccagagacaaccacaggctgtcagtctgaaccttgagtggcctggactccagcgggaggaccctgtcagcagtgtctctgggctggctgagaggctggcagcccagtcctggagagaggcacatcaaaggctgggagcgcagatgccacttacaggtttacaacttccacaagcacaggcttctctgtcctggcctggggagctgtgagaggaaactcccaggaaggagggactctggggtatcacagtcataaaagaacaggacttaaagtcctgaggcctgggttccagccttcattcagacaccaaacagttgaatcacagaaagaaacttctcctgaggcctcctttgtaaattgtggggattagactggatgatttctatgcttttaacaactctaaatgaccccaaaatgactggagaagtccccagccacaccctccagtggtggttaagagcatggatgctagagccagaccatgctggctcaactataaactctgccacttagtagctaagttgaacttgggcaaggaatttaatcatttcctacctcagtttccttatacaggaatatcagcccctgtctttgcctgatagggtggttatgagaattccctgagttcacacatgaaagggcagagcagggcctggggcatgcgaggtgctctttgtgcatgagatgcttctgctagttgtcagcacatgcttgtctgtctgtgcc

SEQ ID NO: 1362 - DNA, 125 bp, Homo sapiens
atggagtctcgctctgtcgcccaggctggagtgcagtggcaagatctcggctcactgcaagctccgtctcccgggttcacgccattctcctgcctcagcctcctgagcagctgggactacaggcg

SEQ ID NO: 1363 - DNA, 87 bp, Homo sapiens
ctcacgcctgtaatcccagcactttgggaggccaaggcgggtggatcacgaggtcaggagtttgagaccagcctgaccaacatggtg

SEQ ID NO: 1364 - DNA, 780 bp, Homo sapiens
ctatgaaggaaggagtcttgttgctgatatagtttcctgttgctgccgttactaataaccactaatttagtggcttaaatcaatataattatgatttatacctctgctggtcagaagtctgaaatcagtctgaaagggctaatatcatagtattagcagagccatgttccttctggaggttctagaggactggagaatctgtttccttgtccttttctggttctaaaggctgtccacgatccctggggtgtggcttccatccattttcaaagccagcaatcacattttgacttgtgctttcatcatcacgtttcctttttttactcacctgcctccctctatcacttacaaatacattgggcccaaccagataatccaggataaccccctctcaagatccttaatttaattgcacttctaaagtcccctttgccatgtaaggtaaggtatacataggttttgtaacgaaattcaggtccagaccacttgtcacttgaaagtttaagagatgagcattggtgaaaggatggttagctctattcaggaatccaacaacccaggggaggcagtgaactagtgttcaaagaccgccgagttctgtctccatatcaggggtttttaagggaaattagaaaaaatgatgatcaaaacattcttgtgaaatgtgcagtctcaggtcattgctttgttggtcattgctttcttggtcagtgttttgtggccttctgtaggtgccatcagcctattcttatcaggctggtcagcccattcccagagttg

SEQ ID NO: 1365 - DNA, 1459 bp, Homo sapiens
gaggttttcaccgtcatcaccgaaacgcgcgaggcagctgcggtaaagctcatcagcgtggtcgtgaagcgattcacagatgtctgcctgttcatccgcgtccagctcgttgagtttctccagaagcgataatgtctggcttctgataaagcgggccatgttaagggcggttttttcctgtttggtcactgatgcctccgtgtaagggggatttctgttcatgggggtaatgataccgatgaaacgagagaggatgctcacgatacgggttactgatgatgaacatgcccggttactggaacgttgtgagggtaaacaactggcggtatggatgcggcgggaccagagaaaaatcactcagggtcaatgccagcgcttcgttaatacagatgtaggtgttccacagggtagccagcagcatcctgcgatgcagatccggaacataatggtgcagggcgctgacttccgcgtttccagactttacgaaacacggaaaccgaagaccattcatgttgttgctcaggtcgcagacgttttgcagcagcagtcgcttcacgttcgctcgcgtatcggtgattcattctgctaaccagtaaggcaaccccgccagcctagccgggtcctcaacgacaggagcacgatcatgcgcacccgtggccaggacccaacgctgcccgagatgcgccgcgtgcggctgctggagatggcggacgcgatggatatgttctgccaagggttggtttgcgcattcacagttctccgcaagaattgattggctccaattcttggagtggtgaatccgttagcgaggtgccgccggcttccattcaggtcgaggtggcccggctccatgcaccgcgacgcaaacgcggggaggcagacaaggtatagggcggcgcctacaatccatgccaacccgttccatgtgctcgccgaggcggcataaatcgccgtgacgatcagcggtccaatgatcgaagttaggctggtaagagccgcgagcgatccttgaagctgtccctgatggtcgtcatctacctgcctggacagcatggcctgcaacgcgggcatcccgatgccgccggaagcgagaagaatcataatggggaaggccatccagcctcgcgtcgcgaacgccagcaagacgtagcccagcgcgtcggccgccatgccggcgataatggcctgcttctcgccgaaacgtttggtggcgggaccagtgacgaaggcttgagcgagggcgtgcaagattccgaataccgcaagcgacaggccgatcatcgtcgcgctccagcgaaagcggtccatcgccgaaaatgacccagagcgctgccggcacctgtcctacgagttgcatgataaagaagacagtcataagtgcggcgacgatagtcatgccccgcgcccaccggaaggagctgactgggttgaaggctctcaagggcatcggtcgagcttg

SEQ ID NO: 1366 - DNA, 396 bp, Homo sapiens
tgatacaaggcctggctctatcacccaggctggagtgcagtggcacgatctcagatcactgtaacctctgcctcctgggctcaggtcatcctcccaccttagcctccagagtagctgggactacaggtgtgcaccaccatgcctggctaatttttgtattttttgtagagacacggttttgccatgttgcccaggctggtctggaactcctgagctcaagcgatacgtcttcctcagcctcccaaagtgctggattataggggtgagccaccaagcagaatagtttcttttttccttttcttttttttgaaacagaatctcattctattgcccaggctggagtgtaatggtgcgatctcggccactgcaacatccccgtcccaggttcaagcaatt

SEQ ID NO: 1367 - DNA, 129 bp, Homo sapiens
agatggagtttttgctcttgttgcccaggctggagtgcagtggcgcaatctcggctcactgcaatctccgcctcccaggttcaagtgattctcctgcctcagcctcctgagtagctgggattacaggca

SEQ ID NO: 1368 - DNA, 130 bp, Homo sapiens
ttttttttttgagacagagtctcgttctgtcccccaggctggagtgcagtggtgcgatctcggctcactgcaagctccgcctcctgggttcatgccattctcctgcctcagcctcctgagtagctgggac

SEQ ID NO: 1369 - DNA, 465 bp, Homo sapiens
ggctggtctcaaactccgaggctcaagcagtcatcctggttcagcctccgaaagtgctgggattacacgcatgaaccactgcacccagccttaaaatttttttgtagagatgaggtcttgctatgttgccctggccggtcttaaacccctaagcccgagcgatcctcttgcctcagcctcccaaaatgctggaattacagggatgaaccatggtatctggctgtgcaactgtcttttaaggtggagtagatgaaggagagagagagcatgggggttttattattttttaaatttttggtttgagagagggtctcactctgtcacccaggctggagtgcaatggcgtgatctcagctcactgcaacgtctgcatcctgggctcaaatgatcctcttgcctcagcctcccaagtagttgggactacaggcatgcaccaccatgcctgcctaatttttgaatgttttt

SEQ ID NO: 1370 - DNA, 354 bp, Homo sapiens; identical to SEQ ID NO: 1326

SEQ ID NO: 1371 - DNA, 485 bp, Homo sapiens
aatgaaagggagaggggaaggtatatgtgtggtgtttggggtgggggttagttttagacaggcaggcaaggctgcctccctgggccgggggtgagacgtgagttggggagcacagcaggtgcttttgcagaagagagctccagggagagggaacagcaagcgcagagcctcaagcaggagcttctgcagcagcagagggagggaggtgtggcagggtagtggctgaccctcagtgtccttgtggcccttggaaggtctgtggagggggtatgacaagagtggtattcctttcattttaagggcccctctggttatggtgtcaagacacagagagatagagctgcagggcaagggcaggagtgaggggaccagttaggaggctgccaccatccgccagggacgcactgatgtggctcagagcagggtggcaggggtggcatctgctgagactcctgagatccaactgaaagagacaacaagtttta

SEQ ID NO: 1372 - DNA, 116 bp, Homo sapiens
ttttttgtatttttagtagagacagggtttcaccgtgttagccaggatggtctcgatctcctgaccttgtgatccgcccatgtcggcttcccaaagtgctgggattacaggcgtga

SEQ ID NO: 1373 - DNA, 1628 bp, Homo sapiens
tggagtctcgctctgtcgccaggctggagtgcagtggcgtgatctcggctcactgcaacctccgcctcccgggttcaagcgattctcctgcctcagtctcccaagtagctgggactacaggcgcatgccaccatgcccagctaatttttgtatttttagtagagatggggtttcaccatgttggccaggatggtcttgatctcttgacctcgtgatccacccgcctcagactcccaaagtgctgggattacaggcgtgagccacagcgcccagccttttttttttttttttttttttttgacacagagtctcaccctgtcacccaggctggagtgcagtggcgtgatcttggctcactgcaaacttcatctcccaggctcaagtgattttcctgcctcagcttcctgagtacctgggtttacaggcctacacaaccacacctggctaatttttgtattttcagtagagacggggtttccccatgttggccaggctattcttgaactcctgacctcaggtgataaacccacctcggcctccaaaagttctgggattgtaggcgttagccaccgtacccagaccctcataaaccttttaaatggaagtaaacataactgtgctctgaaaactgatgtttaataaaatgagatgaaaaagtgtttctaaatccatacattgaaaaatacttgatatgagtaaattaataactaagtgctataagaagatattcaaccattccatttatagtcctaaaagtttgtgtactcaagctgacaaaaaattgtttttggattttctaattaaaaaaaatggggaggccgggcatggtgtctcatgcctgtaatcccagcactttgggaggccgaggtgggcagatcacgaggtcaggagatcgagaccatcctggctaacacagtgaaaccccgtctctactaaaaatgcaaaaattagccaggcgtgggggcacaagcctgtaatcccagctactcaggaggctgaggcaggagaatcacttgaacccgggaagcagaggttgcagtgagccgagatcgcgccattgcactccagcttgggcaacaagagcggaactccgtctcaaaaaaaaaaaatggggaggccaggcacggtggcccatgtctgtaaccctagcactttggggggctgcggtgggtggatcacctgaggtcaggaattcaagaccagcctggctaacatggtgaaaccctgtctctactaaaaatacaaaaaattagcagggcgtggtggtgggtgcctgttatcctaggtacttgggaggctgaggcaggagaatcgcttcaacccaggaggcggaggttgcagggagccaccattgcactccagcctgggcaacagaaggagactttgcctcaaagaaaaaaaaaaatttttaatggaggactgtgcctcatatttatgatgaaggcgataaaatgttcacagatgtgaaattagcccagctaatttttgtatttttagtagagacggggtttcgtcatgttggccaggctggtcttgaactcctgacctcaggtgatccaccggcctcggcctcccaaagtgctgggattacagccgtgagccaccgtgcccagccaaaattttttttc

SEQ ID NO: 1374 - DNA, 1366 bp, Homo sapiens
ttattgatatgatgatgattaataattaatttatttccattttcactttcatactattcagtcccaattctctggaaaaaaaaaaaagaacactggaaaaaaacaggtttactattatatagcagagaaataaggataatgtttcttggtttcaaagttctgatttgtaagttaaaccaagtcaatacaaaaaccttccttcagccaaaaaaaagtagggaagtaaaaacccttttgtaaatccttgttattaggttgctatgaatctgaaatacaatatacacagattatatccttaagcattaggttggcacaaaagaaatcgcggtttttgccactgaaatggcgaaactgcatttacttttatatcaacctagtattataaaatatatacaaagcaagttgaggaaccaaacacaaaatacatgtctacaaacatgctttccaatgtactataaataaacctttacttaagatcttgaaatcaaaattagtttgtatagtattcagaatcaaacctaatgacaaagcaagatgaaataaccaacagcatcatcattatcagaatagtaactaacatttatataaaagattactatgtgtcagaaactaagggctttcatttcattcaattctcataacaacctataaagtaggtactatcattatatccattttacagatgagtgaatgaaggctagaatttgggtcaccggcccaacatgacccaactattagtagtaggtagagaagcgggtctccgaacctaggtaatctggctttggaatctgtgctcataaccactgtgctataatgtctctgatagcagctactaattaaaaaataaaaaatgtatgttttcctaactttaatcatcaccagataaggaatattcttggttcatttatgtctaaattttcaacatactttttccctttcaacctattaactatcctcaattttgagtcagctgattttatgtgattgtttccttccctcccacccccagtacactgcctttatgtggctgcatttgtattagtctctgcttagaaaaccaaaaatgtatgacatgattaaaccttgtttgttcaatataaaataagagttaaatactttccataactttgctctcttctcaggccttcaaagtcttgctcagtaaagtactgttgatgctgataatcagagtatcccaccaagagcacatgatgccttggactgcaatactgtcacagcagtgtcttcagttcttctctactgtgtataatgcagagcaaaatgggggtggtggtagaaattatggtagtaaatatatattttctagaaatatatccatttcgtggaaagataatattaagaccat

SEQ ID NO: 1375 - DNA, 786 bp, Homo sapiens
gatggtgttggcctaaggcctcttggcccttgttaggacttggtttaccatggcgcaacacatccatgagattggcaaaaattaaaaagtctgacaacagaaaatctggtaatctggtgaggatgtggagcagtgggaattctccaatactgccagggagcatgggcatcaatcccaccacactggaatgcaaaggggcattctgagtagaactgaagatgtgcccatccttgaccccacagttccagccatgggcatgcgcatgaatgtgcacacgtgttgactgcggcatttgtttgtcattatgaaaacatctaagtttccatctatgggagaggggatatgtgggagtgcccaacagtggagttctagagagcagtaaaaataaatggactagagctgcacacgtcaaaatggatgaagataaaagacatgagggatggagagcccccccctggccacagaagtatatgtccaatatgatgctggtgtatccagagtgttcaaacaaacaacacacccactactcattgtttccaacgtgagtatgaaagtatggagcagtgcggagggccaggagtgctgaatccacatggttacttctccaggcgggggccgaggaccagggctggaggtttactccaggagcttcagtggtgcatgctgaatgtgctgtttcttgggctgggggacagagatgtgcatgctgttatacactctatattgaaatgattgtataacaatatactaatttatcatgtaataaatttgaccagaaagaaacaa

SEQ ID NO: 1376 - DNA, 485 bp, Homo sapiens; identical to SEQ ID NO: 1371

SEQ ID NO: 1377 - DNA, 116 bp, Homo sapiens; identical to SEQ ID NO: 1372

SEQ ID NO: 1378 - DNA, 913 bp, Homo sapiens
tttaataacagttgttcacacatgtttattgataaaccgtccaaaatgtaggtcatgtgtaaacaattccagttgttgggtatattgggtattgatccctgcagcctcctaaagtgctttggacatgaactgacccgcaaagcaagggcaaaggcctcagatgcacagagctgccctgacatcccttggctcggagtccctgtgccccatgtcagagccctaaacctgtctcccctgcctgcactgtgtccggcagacaaagggcagctgtctgcacggtgaccccgagtacccaggacacggaccacgaggacccaatgaaaatgtcccctttcaccatgatcggcagcccccttcccacagccccgccagcccacaacccccctcccacggccccgccagccgtcctcacagggcaggcggcatctggcatctccaccagcatcacacgcagctgtccctgccagctaggcaaggccgtaatgaccggcacaagcttgggcttgggccgtgggcagcaggagggctggagaggcatggggggaaccccgctctccctccggcatggggcctccacctgcagcagtaagcagcctctcagcccctgagcctggggacctgcccgggcagcacagggccagggccaagaagtatttgtgagaaggaaggtggcctccgccacccctgcctagcaggcctctttctgctgccctttagaaggcactgggtggcagaggaggaaggggagggaggtgttccaaagccagtgcccacccctccacagagccaaccccagggcacacaggaagcagccaccacacgtgggagacaggctgccctcgtcaccgctgccctccagcccccccttcaccctgccctcctgaccctcccacccctgccttcctgccccccc

SEQ ID NO: 1379 - DNA, 634 bp, Homo sapiens
tagcatagtgcctgacatatagcagtttcttaataaatgaagtcattggtctattactattattgctactaatgtgcaataataatagacaaaagcaacgtagaggtgaaagtgcagacgcctggcctttgccctggggtttcccctctgctgaggaatctgtggctgctcagctttaagggtgcagggaggtggccacattcctcaggccccagccctggcctcaggcatgaggcaacaaggaaagcaggtttaccttcagggcaatccttgggaaaagaataattttagggacaactagaaggctccgtggtctctcaaatatctctcctaaggcctggatgctgcctaaaactcatttcagggtagccacaccactcatcctgctaggacagtaagaaagctcaaatacgccaatacccaggaaagggtacacaaaatgtgagtatagttcaggcaaacagcataaaatgatatgagatcttaagagctgtgacactagagacttttctcttttttaaaatttttttatttccataggtttttggggaacaggtggtgtttgtggtgtttggttacatgagtaggttctttagtggtgatttgtgagactgtggtgcgcccatcactcgag

SEQ ID NO: 1380 - DNA, 634 bp, Homo sapiens; identical to SEQ ID NO: 1379

SEQ ID NO: 1381 - DNA, 1403 bp, Homo sapiens
actgtaccaaggcttcagagtgagcagggggacatctggataggttagccagggccacagagagaagagctgcttacacctgaattgtttcacccttttcaagaacagggttgtccttctccccatctggatccttgggctagatctctgccgaggggctccgtcaagtcccgcaaggctagagaagggagccccacatcatttccactttcaaagagggaagatgctcgtcattcaaattacttctgttgatttccatggtatccccctgtccgtcccacaatctcttaccaggcgtcaatgcacatgcaggggatggaaagaggatgagccgatgagcagactttgcattaatcaaggagaaagaaaaagcagatggaaggaggtaggtagatggagaaagcaacagctccttttagcccttgatgatggccctgaaggcctgtctcttttagtgactcctctttgggtcctcttcccctacctctcagtgactaggttcctcatattaattccctgctgtgagtttggctccttgtgctgggcaattcagtcatcctcagaaagagcaaagttggtcttggaattaaggtgcaggtggggaaaaagagggactcagctagacacgaagaaaggctctcttcccagtctaagcccttctaccgtaaggggcattttatcaagacagccacccaactccccatcccatctcccctcctttgtagaaacagcatttgactcaccaagcctttctctccctttccgtgtgtcttgcttagtttctggattgagagaatttctatccttgctccctcgaactctaaaagagcttcttttgaaaactggggagtatcaggcctacctctacatgtgcaacagtgccaggattcaaaggaaaagctcattccagcctctgcctcttgggagatggttcagagtgccacatagggactgaaagagggtgtctgaatccttcaggaatgctttaagtgacattgttgaaaagagataaagaaaaggaaaacaatggaattgggtttctaaggtccctggaaatatcctgggggtctaatagagaaagaaaataagaggaaatttgaagactcacttcttccttcatctgaatccactcagatggcaactgatctctgtcccaaggaccctctaccccacccaattcataatcatctcagattagaaaaggcagaattccttcccattctcaaatcagcatttgggttaggggcccctaagttacgtgagcatgttagaaatgtgaccccaggcctcaagagagaggctctgccacatgagaggagataggaatcatgactgaaaggggattagcacagaacagagaaaactgatttgatagacaaatcaaatagaaaatataaaaaaaa

SEQ ID NO: 1382 - DNA, 10337 bp, Homo sapiens
gcctcatcatcgttgtcatagttgggcacagtgctgaagctgccagctcgctgctcatgggtaataccacattcgggcaagttttctacggacctcgtactccgaattcggttctcggggatccgggcagggacactggtggtgtcaaagttttcacattcaaggacttccacataaatcaggtagggagcctgggggaagagtgagacagtatttgcaacttacttccaccactaacccccaaatctcaactctgttagcaaggttcttcctgctgtcctttctcctagctccagccttcatccaatagtcctctgaaactatgaacactatatttagggcagatacttgtcctatgatcacctatgtaaagaatttgtgtgacagaatccttaagtcttcaaaatatttcaactgagctccaaaatgtacagatgatgtgcttgggccaaaccactctagactatcaattacaggctgtaagggaggcctagatgcctctgtgggctcgtcctgaagacagggcccagggagctacagtggacaaaaagactgggacaaagctgggcactgtcccaaggagtgtcccaaacttcagtatttcctttgaaagaagaatatgggccgggcgcggtggctcacgcctgtaatcctagcactttggggggccgaggcgggtggatcatgaggtcaggagttcaagaccagcctggccaagatggcgaaaccccgtcgctactaaaactacaaaaattagccgggtgtggtggcaggcgcctgtaatcccagctactcaggaggctaaggcaggagaatcgcttgaacctgggttgcggaggttgcagtaagccaagattgtgccactgcactccagcctccgcaatagagtgagactccatctcaaaaaaaaaagaagaatctgaaccatgaatactcattccagtcagcacacaaattcagctaattctctccagtgtgaattgggcatccttctctccttttgtcggctcattctgatcagaaaaggtcttagaaacaaaatatttctctatccttatggttgctgtatctggaaagcccaagagttatagaaaggctggagaaaagctaccaaaatgaccataaggtggggtgaagagcaattctcctaagatacagcaagaaggaagctaaaaagattaggtttctttggtccagaaaaacaaaacccaaaaagggatacaggggggctctcaaaatcacaatcgcactgagacagagtcatggttgacatatgcatcatgaactatgaagggagtctaggatgttggtgagggcctcactggtcatacacgcaaactctgaacaaccatgggtgaagagtcacgtccagggtaggggtttgggccagaacccatctaccttgtccttggagttgaggacaacagcctgtgtgtggggtacacggaccacgtggtggtcaaagccagcagtgggcagccagactcgggcagggagcttatggttgagcagggagagctctgagatcagcctctgtgttttctgctctttggtggggagcgtggccagccgcttgccgatcgccatcagggacttgatgaattctctctcaggagccagtcgaacaggctacaggggtttggggtaagacaaaagatggtgaagaaaccatagaatacaatggcacacccactcagtcactcctggccatgcaggccggggaccccactatctggagaactccaggaaaggagctgctttttagtcttagtaggagcttccacccacccttcacaacttgaattgagaatagccagcacattccttccctataggctatcccttgagggtaagggaggccatgagtccaggtaactgggatgcactcctcttctcctggacttgggttccttaaggactgtaccaaggcttcagagtgagcagggggacatctggataggttagccagggccacagagagaagagctgcttacacctgaattgtttcacccttttcaagaacagggttgtccttctccccatctggatccttgggctagatctctgccgaggggctccgtcaagtcccgcaaggctagagaagggagccccacatcatttccactttcaaagagggaagatgctcgtcattcaaattacttctgttgatttccatggtatccccctgtccgtcccacaatctcttaccaggcgtcaatgcacatgcaggggatggaaagaggatgagccgatgagcagactttgcattaatcaaggagaaagaaaaagcagatggaaggaggtaggtagatggagaaagcaacagctccttttagcccttgatgatggccctgaaggcctgtctcttttagtgactcctctttgggtcctcttcccctacctctcagtgactaggttcctcatattaattccctgctgtgagtttggctccttgtgctgggcaattcagtcatcctcagaaagagcaaagttggtcttggaattaaggtgcaggtggggaaaaagagggactcagctagacacgaagaaaggctctcttcccagtctaagcccttctaccgtaaggggcattttatcaagacagccacccaactccccatcccatctcccctcctttgtagaaacagcatttgactcaccaagcctttctctccctttccgtgtgtcttgcttagtttctggattgagagaatttctatccttgctccctcgaactctaaaagagcttcttttgaaaactggggagtatcaggcctacctctacatgtgcaacagtgccaggattcaaaggaaaagctcattccagcctctgcctcttgggagatggttcagagtgccacatagggactgaaagagggtgtctgaatccttcaggaatgctttaagtgacattgttgaaaagagataaagaaaaggaaaacaatggaattgggtttctaaggtccctggaaatatcctgggggtctaatagagaaagaaaataagaggaaatttgaagactcacttcttccttcatctgaatccactcagatggcaactgatctctgtcccaaggaccctctaccccacccaattcataatcatctcagattagaaaaggcagaattccttcccattctcaaatcagcatttgggttaggggcccctaagttacgtgagcatgttagaaatgtgaccccaggcctcaagagagaggctctgccacatgagaggagataggaatcatgactgaaaggggattagcacagaacagagaaaactgatttgatagacaaatcaaatagaaaatataaaaaaaatcagccaaactcccagaggtcctgcatttcctctcacgtctttgcccagcaacaaggtccaagaccctgtgggaccaaagggtcaggggttagtccagagggaacaagaaaggagaggggattaaggaacatcctgggcagtgagctgggaaaagggaagaactcagacctggaaaaaatgtggttgaagttaaaaaagaaaaccagttgtggagaggcaaaactttccttcaggccaagtcctatttgtttttggagtcagctcaccagcacagggcctagcatttagaagattatgaataaatatttgataatctgacggcagaagccatggggaaagggttctgggtgggagaaacaggatcctgggggtttctgccaggcagtttttggctctaatccaggagtgaattctacctctctcccagctgtttgctccagacactcaggagctgggggctgagcagcactgtactccagctgtctctgagagaaggatcagctgagctcatctcagcctgggctcaggatttccaccgcaaaggtcaggggaactccagcagatctgggaggtctgggagggaggagctgatctcccagtaagaaaaggggcattttaactccagccttggcctgggggctcagaagacctggggacggagaggaaatgcggccactgggggagcctgccaccccgtcccagcctggccccacttacggaactgaatgaattatcaatactctcggtgctggaggagagctcctgggaaagggccagagggcaaagggagaaggagggggtgggaagggaggggagagagacaaaggtaaagaatttagctccaacttggatcgtaactgcttctctagtgcagttctacctttctgctttaataaaagaaagtcaactcagaaatgctacttgcccagatgcttgaccacttgtaggagatgctggaagggcagctcagactttaaggtcagaaggactgaagagacaaagcagcctctgcttttcactttattcacttctattctcaactgaatggatcttccttctaggccaaagctctaaagctgggtccctagggcagtaactgcactgccaagcttccctgctctttttttttacccactcacatgctctcaaccaaatccttctccatggggaccaccacaggactgaacttaataagctgcatggctcccatactggaaaccccatgttcctccagctttttggaaacctcagggaggaagaaaagctaaactttcagtggcaggtatacctcttctctaattagcctcattatcaccctgggaagctgaatcccaaccttgaacctctgtgacaaagagcatcctagaccaataagcccaaaatctctgggctggatgctgatgggagtgaaggataaatcaatctcctatctaccaaacctccttaggcttcctatcaggctatccacatgacaatcaatatactacaatttttgatataagttggggagttagctatatccatctagaaagctgactagctggatagcagctgtcctagtcccagcccagaggatttatctaaacatcaccccattgctgtgtcatatgtgtccgtgtgcaaaaacaggggaaagagatggtgtcaaactctcactcagcagctctgaggcaacactcatgcacagggctcatcctgggttctgtccaacatggtctaccagggcagggaacagagcagcacgtgtgcacaaatctaggttgtgggggacgttgaggtcggggtgggggaggttagacttaaaagacaaagtcctaagagctcccagggcaggagggcagtggtgagtttctactctgaaatctgctgagtagattcaagcatccacttgaactcaattccatggtttcagttctattctagctggaggtcctatagtcaggtccttccttgaagaatctggggactggagcactttgagggagaagccacatttggaaacatgcccctaaggcaacaactcttccattttgggtagaaggtggtgggagaattaaggcagtgaggatgtcagagtctattatgaattagtggttctatttctacctatgagctggttggagaaggaacagcaggcaagatattggctccctgagcaacgctccagctgattctgtcacagacaggtcctgtctgactcattgacagccctgggggaagggaggtatatcatgacctgctcctctcctactccctgggcttgagtcactcacactgagtcagctccggggagtaaagatgaagcaagaagctgacatcacaccatatcaagctagaaggcctactggggcttccagtgtgacatgcggcagatttctctgtacaaaggttgcagtcctgaaaagacaaagctaatctactaacagtgtcatcatatcggggagggtgtgatacctaaatcactctctccttttagctcccccattctataccaaaatatttgccatttggttacaaatgggaggacaaactgcctgggcagagttccccgactaggctgataaaatggctttgaagcggcaggctttgaggagcagtggtggaaaatgtgaaaaatcagcacaaagccttctgactgtgggagagagtgtaaaggattcctcatagtaagaaagagaacactgtgagagctgagcagagaacaactctgcagggagaccatgggcaggaagagaactgtacatgctgcccctgagcctcttctttgaggcccgacctcatccttgggagcccctctactggtggtaggagcatagtattaaactcagaacctaaaagaaaagcaagagactgggagcagagtgttagggtctacctagagattctcctagagtatctctgcttaggtcttagataattatgtgcctcattttagtaagctgtatacttcctgcttatggcagaaaacaactttttcaagagagtcacaaactaaacagttccatagatactggggttttcattattacttcacatgttcctagagggaaggataacattttatcccccgtcctccacagcacagctcacggctttggacattgtacaaagtcaataactacatgttgagtgaatgaatgttacatgaaagggaagaaggatgagtaaaaggaaaaccaattcctttggtatttaggggacaaaagccttgacagacgcatcctcaaaatgccaaaggggctgggtctagtcactcatgcctgtaatcccagtgacttgggaggctgaggcgagaggatgacttgaagccaggagtttgagactagcttgggcaatagagcacgacctcatctttacaaaaaaattttttaaaaattagccaggtgtggtggtacatagctgtagccccaggtacttgggaggctaagatgggaggattgcttgagcccaggagttaaaggctacagtgagctatgactgtgccactgcacgccagcctgggcaacagagcaagaccctgttgcaagaaaaagggcggacggacagacagacgggtgggcggaaggaaggaaggaaggaaggaaggaaggacggatggaaggaaaagggctgggagagacccctgtgctgacgactctaatgcttagaaacctagtgatattcatgtttctgtctctttcttgctctcccattttctgtggagccataatgaattcaggtatttcattctgtcagtatcagataacgcaggagtgcctgggaacatagtatctccttcctctcctggatctagtgacccaagataaggagtcaggttggaagaacggcagctacagaacccaccctaaatgatgtaagtattcacctaatacctgcctctcagtgccatccataatcttatcctggagtgggagttagatgtaaggaaagagggaccaaggatcagcagagtaagaaaagccctgaggcctcagcttttctggtcctaagatgagcactacaaaatggataaagagaaaagccaagcctgacaagaggcaccaaggaattcacttccagctgctcaccctctgctacaggtttgactccaagatgagacagctatccaacccttcatgttccactagaatctggatgactcttcttgttctgcagcaacttctcttcatgacccagggctctgctgccaagctcaaccagatatgaaaacggttcattctagttctgacaacagttttggctttgcctgtgcatggatgtggaagctcagatggccatagcctgggccgttcttccccacatggcttctgacagctggggaccttgggaagtagatattgagaaataaccaaggtagttcagctgaatgattatgagcaccagctggagatttgagtcctggtctgacattcactagttgagggaccttgggcaaaacatctaatctttctaagcctcagtttccttgctggcaaaataatacctgtctctcagcatggttgtgaggattaaatgtaaagtacttggcaagatgcctggcacataagtgctgaataaatgttagcacttttagctttaccattattaaactatcctaacaaaattccaaatttccagagagcaggctctatagtctccctccctcttccttttctctagtcactctgacttccctctatttgaaagaagtcccattgtatcaaaaacgtgggtgggttatatgccccacagaggcagatgccaagaccatagctatccgcatttttcaaaaagtgcaaattcctcctttttttctccctcttttctaggctgggttggaagccaggatgggagcctggccaatggtgagtcagaggggaggactggagcaccattgtctggctgggacaccaggtcactgacacttggtagtccactgggcagctttccctgctatctgtccagatgtggagtgaagagtgggtataacctattcatgtggccacctcttccctgctctatatcctaagttatacctccaactgctgctgtagcttcctcttcttcccagcctccaggtccttgactaggcactatatttactctatactaagagtgctttctcttccctttgtgcttctcccaaatggtatgggaaagataccagcaaggcactcttccccctaaggaaaggcaggcaatgaaggcattctccagatgcctcagtgataagaaataaaccttacacttatgtcaacaaaaggtaggatcttcagagggtagtgaaaagggattagattatgaggaggagtggccaggagaatgaagccgatgttctaacatctcccctaccccagcacacagaaagacaatagtaccttttcctttcccacagatgctgctctgagaggctctggtagctatctcaagtctcaggtcagggtgtggagggcttctgccacagttctcattaacatagtagatgttaatggaatggcagtttatttatttatttatttatttagagacggagtctcactctgtcgcccaagctggagtgcagtggcgcgatctctggtcactgcaacctctgcctcccaggttcaagtgattctcctgtctcagcctcccaagtagctgggattacacgcgcccaccaccacgcctggctaatttttgtatttttagtagagatgggattttgccatgttggccaggctggtctcaaactcctgacctcgtgatctgcctgcctcagcctcccaaagtgctgggattacaagcgtgagccaccgcgcctggccagtgcagtttaataaaaatgatttgggacacagtcaggagcgtcagccttgccatgacctatatgacctgaggcaactcactttatctctctgggtctgagttcttcctttgtaaactaaggcaggcaaaatacatgaattctaaggcctttccattctaacattccatgcttttatcagtgaaatgaaacagggaggacagaaagaacagcgtaaccctgtgtgtatataggaggcatcctgtctccatgcagccctctaccaccttttgtctctggccctccccagaattttacctcatcctcattctccactttagggttgctggctgttcgtttcaggttgctgctgagacttatgctggcagtggcatctgacttagagcgctggtgagtccttttggagggagacagccctgtgtcaggggccgggctcaaggagggcagctccctcttcctgtgagctggctttagctcatctgagaggatcagcttccgtagcttggtcccacgggagtgtcgttgagtggaaatgtgcatgtctgaagaataggccccaagcaacagggcacactggagggaaaagttaatgctctggcggcaacggtggactatgtagggcttaatggcatcacccacgtcctcatccatgtggatgtacatgttaagcaactggggcagatagaagtccacgtcctcgttgcgaaagcagaagagccggttgccaatgtaggcttgtactccaggctccttggagttatacaggtatgaaatggccatggagatgtcaaacagttttgactcaaacagcctcagcagccaagactgtttagctgagttgttctgccgccgtcttcttgctcctttggctgtgcctgaggccacagcggcccccatctcatcttcctcctccctgatctgggcaggtggatcatctaggcaacggatctcactgtccacaccatccccattgaccaactccagtggggtgcctctgctagagactgccacgcctccatgcaaaagcttgactttctccaacacctcctggcaggccttctgggccacctcagggtcaatcactgatagttccccgaccccctccgtgatgacacttagcagggaccccccattattccctggtgggccagaagtgggctcagaagttggcttcaagggggcaggctccactactgtatctcccatggccacagccagacttcgagcttccaag

SEQ ID NO: 1383 - DNA, 274 bp, Homo sapiens
ctccatctcaaaaaaaaaagaagaatctgaaccatgaatactcattccagtcagcacacaaattcagctaattctctccagtgtgaattgggcatccttctctccttttgtcggctcattctgatcagaaaaggtcttagaaacaaaatatttctctatccttatggttgctgtatctggaaagcccaagagttatagaaaggctggagaaaagctaccaaaatgaccataaggtggggtgaagagcaattctcctaagatacagcaagaagga

SEQ ID NO: 1384 - DNA, 117 bp, Homo sapiens
ttgttgttgttgagacggagtctcgctctgtcacccaggctggagtgcagtggcgcaatctcagctcactgtaagttccgcctcccgggttcacaccattctcctgcctcagcctcc

SEQ ID NO: 1385 - DNA, 998 bp, Homo sapiens
ggccaacatggaagccacagggtctctcgtgccctgatctgggaagtggcaggccgccaccaacactgctgctgttgttgttcatgctaagtcttggcaagcctctgggtcgcacgtagggcatgtctccattcaggccagccgcatttcgagccacacgtggttcgtggcaactgttggacagcacagatgtagggcatcaaaagcctatgaccgtatgcaacctggtgcttctgagatgctcacgtggtccatgggtagaagttgttcacctgaggtcttggctacctggcattagcccacacacagatattagtgtgcccacctagtgtgcagagtagcttaggggtgcatccctctgtttctgccctagctgataattctcttgaccacaggatcccagtttcccttcctttatatgtaagacactttgttcagtgtctttatttcataatcactgtcgagaaatggaggtaaagtagtatcagttgtctgtagacttagtggcagattgtgggggaggctgcatcccaaagctgggctggccctggaggacaggctcagggacagctccatgtcccctctcatgggtgccaaaccattctgtgagtgcctgtgcttcaaaggtgagcccggagagctctgtactcggccccctctggccttgagggaacgggggctgggaggtttctggctggaccctgaggggctgcttgcgggctctgggtctttggacttggcaccgttgccttggcatttgttggcttgggagttgttgctgctgctttttcccagatgcatgggcctgctaatgtcagtgtttgacaaaccaaggagaggacactttcctgagctcttgaagtccatgctttatcgtttttgccttcagatttcagagcgacctagcagccgtgtgtaacaaacacgtcacttgtccctgtggagattggcccaccagcctccactggcaccctgtccactttaacaagcacactcga

SEQ ID NO: 1386 - DNA, 998 bp, Homo sapiens
ggccaacatggaagccacagggtctctcgtgccctgatctgggaagtggcaggccgccaccaacactgctgctgttgttgttcatgctaagtcttggcaagccactgggtcgcacgtagggcatgtctccattcaggccagccgcatttcgagccacacgtggttcgtggcaactgttggacagcacagatgtagggcatcaaaagcctatgaccgtatgcaacctggtgcttctgagatgctcacgtggtccatgggtagaagttgttcacctgaggtcttggctacctggcattagcccacacacagatattagtgtgcccacctagtgtgcagagtagcttaggggtgcatccctctgtttctgccctagctgataattctcttgaccacaggatcccagtttcccttcctttatatgtaagacactttgttcagtgtctttatttcataatcactgtcgagaaatggaggtaaagtagtatcagttgtctgtagacttagtggcagattgtgggggaggctgcatcccaaagctgggctggccctggaggacaggctcagggacagctccatgtcccctctcatgggtgccaaaccattctgtgagtgcctgtgcttcaaaggtgagcccggagagctctgtactcggccccctctggccttgagggaacgggggctgggaggtttctggctggaccctgaggggctgcttgcgggctctgggtctttggacttggcaccgttgccttggcatttgttggcttgggagttgttgctgctgctttttcccagatgcatgggcctgctaatgtcagtgtttgacaaaccaaggagaggacactttcctgagctcttgaagtccatgctttatcgtttttgccttcagatttcagagcgacctagcagccgtgtgtaacaaacacgtcacttgtccctgtggagattggcccaccagcctccactggcaccctgtccactttaacaagcacactcga

SEQ ID NO: 1387 - DNA, 998 bp, Homo sapiens; identical to SEQ ID NO: 1386

SEQ ID NO: 1388 - DNA, 314 bp, Homo sapiens
gcattcacagtgcatgattaggaccccaccccgaagccgccatggctgtcggtgcagagcgaggttaaagagatgggattgctgatgtctcattccgtgctggttgaatttgtagcttttacaagaagacgacgtagatgagaagctgagaagtaagcctaagccccgtgtgtttgactggggctcctcaaggtagtcctaggaggccagaagacataaagaagacacttgagttggggtcagtgctgccatctcagggtgaggccaggtctcacctccagaacccctctgcctctcctcttctggtgccccag

SEQ ID NO: 1389 - DNA, 314 bp, Homo sapiens; identical to SEQ ID NO: 1388

SEQ ID NO: 1390 - DNA, 314 bp, Homo sapiens; identical to SEQ ID NO: 1388

SEQ ID NO: 1391 - DNA, 1100 bp, Homo sapiens
gcaccgatgccaatacaactgctgtcgccctcaatgcgccagcccaccctgcaaggatcctaccacctggacccgcagtagccctcctactgctccgggggagctgcagtctctgttgctgccaccaaccgcataaggcgagctgcaaagccatgccatctgcaggctccaatgtaccatagatgactcctcctcttcctcctcctccagcctggcttggagcagctagatgggcaaagctagaaaagcctaaaacgggatgcagggagtggtagcattagagcctcaccttgtcacgctggccactgggtggcagggaccagtttcagcaaaggcactcacacccaccctccaaagtccagcctctccttctggcaaaagctggccaggaactggggcccagggtgagtgtgtgtgcctttgctgaaaccagccctaggtcaggtcctgctggacagaaattgctgggtccaccagggctgcactcctcagggagcaggagtaggagaaactcaggcccagccaggccctgcccacccaagttctggttcccgttcctgatgcctccacccacagtgccctatccccccacccccaccacagtggtgcccactactccctgcccagtagtcccaggttgtctctgcaacacagagcatgagagcatgggccagagaaccacggtgggtgtgggggccctgtcatactcaagattgtgcaaggaggaggagatcactctctagagtctggaattggggaagaggagaacggtcccttccttggagaccacctgaaggaggaaggaggccactgctgtcactgccacctccgcagcctgccaacgccactagcagtgtagcccctgatagcacccctaacctgccgcctgctgcctgccaccaacagtgtagcccctggatagcacaccaaacaaaccccgcaccagctgcagggtgtgtaaccccaatatcccccccaaagcaccctccctcccccagagcaggcagtgtagcacccaatagtgcccacaacctgacccagccatgggtgttgctgcactagatagcacccgaaacctgcccccccaaccccacctcgag

SEQ ID NO: 1392 - DNA, 12473 bp, Homo sapiens
tgctgggactgctatgcatgaccttggagcactccatttgttcatcccacgagccggacagcacgtaatgggccttgccctggctgtcactcaccactcctgtcacctgtggacattggcaggaccagcgtaggtgcagactctgccctgggccccctggggtgcttagaggtggctggtcctgcttaccttccgggctgcctctttggagaagtagctgtagggcaggaacttcagctggcaccggtcattggtcttatggttcacaatctcgatgtcccctgactggcgaaggagggcagtggtcagcggccagcccccgggccatgcaccccctccccaagggcgcccctgacctggtcgatccagagcttgcccacgatgatgttgtgaacagttgaggtgctcttcctccacacgtagtgattcccactggcctggaattctaagtggatggcacctggaggcaggggacaggtcagaggtcatgcccccccatgcagggctctggccagtctgcccttaggcctggtgtcttgagaactaggctggggggttgaagaggcaggcctacagggaggtctcccttggaagcccccagctggcttttgcatcaccagaatcctccctcttatgcacaatgtctctgtgtcccaggaaggcaccgggccccagctcacctagcggcatgatggagatgtattttccccggaacttgctggagatggtgatctcctgccagaggctccagccatgcttggagaacacgtagtgcgcagctgagggggggtggtggctcacctgagaccagacccataggatgtgagcatctgccagacatgagcccaggttccacttgccccagccagggagggacagcttgccctgcctcagcaggcacagctctgtggccataggagcagtcctggctgttcctcaggtggccatggacccaaggcaggcccccaggaaggcactgccttgagcagaaaagcatccgggtgctgtcctgagcctctcagtgcctggctcctgggctgtgaaataggggtgatggtggacctcatgctcaaagacatgtctgtgacaggtgcactgagggctgataaagggtgtcacactatgccgaaggttccatgtccacttctcatctaatcctccccacacaccaggtgtgtctgctgtgccatgttataccaagggggcccagactggcagagtgattttagccaaggggcagtcgggccctgcctctggccagcctggctccagagcaggcatccacatcgatgcactgccccgggcccggccctcccctgccttgctggcagttccaccaagcctcccttgtctgttcttccttattccatgctgctctggctgtggggcccaggcttccctctcctaagtctacccactccccaggacagcagccctagcctagccctgcccctggcctccagctgcccttggacatctcatctcccctcagacaggcagagccgggatcccgctgcccgcagtgtgcctcgcctcacttcctgtctctgtaagaggtgcccacttgcttcctatgccccaggagatgggttagctggccctgagctcagctgatccctccccaaggagcccataggaagctctgcctcctcctcgcctatacctcagcatcctgcccttccagctgctcacaccaaacgctctgcagcctctctggccctcctcatgctcctcctctaaccctaagcaaacccttcctgcccttccttcaaatcgcatccagcatctgccccctccactcccacctccatctccccaggcttccctgtgggccactccctccatcgcagtggagggttcctctggcaggtcaggaggcaggccccacccggggtgcaccgccctccagctgctgcttcttcaccctcctttcctttcctcccctcactctttctgcatcagcaaagctgctccctgaccaccccctttctaaaagagctggaagcagccacagtatctgccttgctttcccagccccatgagaaccagagccgtgtctgttcacttcccagctgaaacctccatgtctgagcagcacctggcatgtcgagggcacctaatgtctgctaagtggagaaatacattcactccagggttcaggccaaggacccaagatcaccctgactgccccccacccccgtatccaaagcgtcggcaaaccagctggctcatccttcaaaagctgcctgtgttctggcctcccccttcccccaggtctggccaccacacccctgcgtgtgtcactgcagccacctcctaacggggccttgcagcagctgcagcctcttcaactagcagcagggtctgtgaatggccagcatcccacactcatgccaggagccagggcaacgccagcaccaacagaatcacctcgtttccaaccaggacgcccaggttcagcatggggctgccactgctgaggctcctgggcctgggtcttggcatatctctgtggggaaggggtggtggggacaggctgctgtcactggctggggcagagtccatcccaccgcacccaggctcctcctgccagccgccttcagctcggtagtgaccccatgctcctccccagcagtgcccacagatgcccctccacctctgctccacaacaccctggactggagcttatcctcccgctccctgcaaccaggcctgaccttgtcctcaccaagctgagttctcatgcccctcgccatctccaggaggccgtgtgcctgcccctgccatggaaggccctgctccctggctggacctcagcttgatggccccttgggtatgggcagtcagggtcagacagacgctgcctcccatttgtcaccttgggcctggcaggaacagcttggccagagtgtgggtgggcgccacccagtgccagcctagccccctcacctgctcacagagggagcgcaggcccatgtcgtcgaggcggtccagctcgaaggtctcccccagcatggggttgaagggcttggcgatgcggtgcactgtggtggagtaggaggacacagagaaggcggccaccaggcacatctgctccactgagctggtgcagtgcactgccttgtccagcaggtggtggtactccaggtcctctgtcagccgctggagcatggacaggggctcattgaagttcacctgtgggtggacaggtgggtggtcaggctgggcaccagccccggcttggcatggtgcccttgcttttctcggatgttcagggacatccctgctcagacagcaccttcacagtgaggctcctcagatggccctgtccaacagtgtggcccccaagccatcacctccctggcccctcctggctgttttctccacagcccttcccactttctggtctgctgcatcctacacacttttatcatgttcactgttgctctcctctgctcggatggacacccaccaaggccaggggttctgcctggcccactgctgtatcttgagtgcagaatcttaggaagcagtgactgaatgggcacatgagtctgtgggtggaggaagtgggtcttccccatgttgcgagctgtgatggggcccggcacaggatgggttaggcccaaggcccctatctcggtgtcacatagggcagggtcactctccccaccatgatgccatcgggtacgagtctcagcttcctcgtgttatcttgctccatcctcccagacactgaagaggacgctgtgtttctccccaccctacacatgtggacacagaggctggagatgtgaaggaacttgttctgggtcacacagcagaaccgtctggcctagtggagatgccactgtagccaggtggcatgaggatccaagctctgagcctgcatttcctggggatggcaccagggatggctgccagctgaaggagggcccacccctccacacacagccccatcctgccactccccatctacagatcgggacagctgggacatggtaaggtcctgtgagatccagaggtgctctggggctccccaggttgctgatccatgcagagcttctccctggctcctcctgtcagagcccaaagatccctgtactttggaagattgggcaatgcctatgtgcacgattagataattagttacatgctcctcaggtgccgttaagaaaatgacactccaaggctgtgtgtacttcacacaggccattactgctcatccacgcacaggaaagcagccccagaggacctgtcggggctgccctgcccgagccacccaccggcatggggatcctggagagctcccggccgatgcagttcttcatgatgctccagaggttaaggctgtagttgggcttgttgggaatgcggactcgcctcttgactttggatgaacccttgggcacgagcgaggcaccatctagtacctgccacataagtggggaccccctcaccgtcagcagaggccagagcgcccccttggcttccaagtttctgccctccaccctgaggactggcaccaagccggccactggtacgctgctggtggaaggccaggatggtgctcctggactggggcatgggcctgcctgctggcccccagttcttggtgctggcctgtccctcccaccccctaggccagaagctgccttctggcccttacagtgctccccctcacttacattgtctgctgagctccagtccacggaacttgtcccggtgctaccttcagcttttctgctggaaatacaaagcgggaggcaagttactaatgaatcccgaggtctccttgggacctggcccatcctctctccagacaacatcattttcattgctagtaaatgtcctggtcactgccgtgtgttctgtgtgtagacaggcaccgcaataacaacatttcaagggtggatagtgtatatgacagtggtcccataagactatcatatcgtatttttaatataccttttctatgtttagatacacaaatccttaaccattgtgtcacaattgcctacaatattcagtacagtcacatgttgtacaggtttgtagcccaggagctataggctgtgccatatagcccaggtgtgtggcaggctctatcagctaggtttgtgtaagtatactctatgaggctcacacaacaatgaaatcccatctggagcaagaccgatagattattgattttttgagacagggtctctctgttgcccaggctagagtgcagtggcatgaccatggctcactgcagcctccacctccctgggctcaagcgaccctcccacttcagcctcccaagtagctgggactacaggcctgcactaccatgcctggctagtttttgtattttttgtagagacagggtttcgccatgttgcccaggctggtctcaaactcttgtattcaagcaatcttcttacccttggcctcccaaagtgctgggagccactgggcctggccaaagcaagatttaaaggaaagaaaaccccaagtagacaactagatagctggtgaaaagaccagatgcagcctaagaccagggtgggggaggctctgcccagctgcagccaccttacctgtcttccttggcctcggtgatcacggtgatgaaggatgtggagtcttccatggcatcaaagtactcggtatcttcatcttcctcactgtcctctcctttgggagtcaagaggcttcctagagacacagacagagctttaatttgtaacctcacaaaaggctcaatctcgcctccctaagtccagagccaagggctcccccaacccccatctggcctcactcccctcctgcttcagtcacctgggcagccctgattccctgggctgcggccacccttgctccctctgctagaatcatgtgctttcaacgcattcaccgcacaggagcctctttctggaagcccccccgatctctcaacatgtgggtcagtctttctgtggcccagcttccctttctgatggacccctgtccagggtccccatgacccccaacccaaggctaggtgggtggccacctggcaccaggacacccctgtcacacaggggacagctgggctcattaaatttaactcttgagaatgtgaacctaggtgcagacaaactgttgccagtgggtgatggacatgggagatacaaaaccacgaagaggcagtcaagagttggccaaggccagcccacatgtgggcacagccagggatgtgcatgtgggggcgcagaagttgtgtatgcagagccagctggcagaaggtcatgggacagccctgccctggctgcccactcaccctcaatgaagctcttggaggggttggccggccggccaggggcactgtggaaggcccgctcgaggctgttgtgctgcttcgccagctgctcaatggtttcctccaagtgcacgcgctgctcctgctcatactgcagtgcccgctgccatttccgactgtgtatctctgctagttccaagaagtccctgcaggcctggggagggaggagtggcggtatgagaccctggcctctggcaggggcccatctgtcagaggcatgtgaaccagagcaactccaccttaaacaggagctgggtaagatgaggctgaaacctactgggctgcattcccagacagctaaggcattctaagtcacaggatgagatacaaaatacaggtcataaagaccttgctgataaaacaggttgcagtaaaggagccggccaaaacccatcaaaaccaaaatggcgacgagagtgacctctggtcgtcctcactgctacactcccaccagcgccacagttcacagatgccatggcaacatcaggaagtcatcctctatggtctaaaaaggggaggcatgaataatccaccccttgtttagcatatcagcaagaaataaccataaaaatgggcaacaagcagccccgggggctgctctatctatggagtagccattcttttattcctttactttcttgataaacttgctctcactttgcacagcagactcgccttgaattctttcttgtgtgagatccaagaaccctctcgtggggtctggatcaggacccctttcctataacacatctgctcccccacctccattccctgtgaggactaagctctgatattttttatcttgcccaaattcctatctaaggcgtctggggagtcatgccctaaaaaccatacattctcatcagatgggctttatttagccctatatatcgtgacttactttccaacctgactctggcataacattacgagtcaaggaagaaaaagtatttcatcccaaaacatgcttctttgccatattttgaagtggccctgcaaagctgtcctttgtgggggaaaacgtgcatctgtaaagaatctctattcacagagctagatcgttttcttccaggccctcccaaccctgaagagatgaagtaagagtcttagcacctttttaaaggtctgattaggaaacatttgtcatctattgtctccaaggggagccactataagacttaaaaagaaccttggtctccacaatctttcatcttaacctgaacatttcctttctattgatcccaggtctttagacaactcaaccaagtgccaaccagaaaatgtttaaatttacctatagcctggaaggccccctccccaccttgcttttgagctgtcccgcctttctgaaccaaaccaatgtatttcttaaatgtatttgattgctgcctcatgcctccctaaaatatataaaaccaagctgcgccccaaccaccttgggcacatgttctcaggacctcccaagagctatgtcatggctgtggtcactcatatttggctgagaataaatctcttcaaatattttgcagagtctgtttttgttgacacctgcagtgaagaaggccctgggggccatctagctgccccctctgctgggatggtcacaaacatgcttactgccccctttggcctccttggggatgtgggaaccctggccttctcagagcccgcccagcaaccagcacccaccttggttggcctcccacggtcaggatgccagttggggaacagcaaacctgggtgccacgggtctgcacgctgcctccccagcagcagctggtttggttcagcctggagctgaggtggctgctgttgctcattatggtagggcccgagcattctgcggccacgtcctccctgcagtgttaggcctcaggtttgtcactggcccttgtctaccctgggccagtccctggccgtggcacagaaggaaggaaagccacgttctgctatcctccccagctcagagaggtaattggtcttgtctggcagaagtgggactggcactttctaccaagctacatcagagtctgaatcacataactgcttttaaggttttcccttcaagcttgtggcctactgagacatccagaatcttttcagcttcccaggtccacagatggttccaccaccagttttgaagcaggggttggtcattctgccctgtcattacagtggagaggatggctcaggcttcagctgtccctggagggcagtgagatcaaatctaggaacctctggatttgccctttctggacacattcttgaagccagtaggaagggacgtttccttggcccgcatctgcatcagtggccccagctgccactccccagcacttcctccccacccaattgccccagctgacctggagcacccactgagctccatgcacatcacaggctgtcccaccccaaaggaggaagatgggcacaccagtcctcacctgtgacacagggacaaggcagctgttgaggaaatatcaggaggtgatgtggcaggcagggcgagggagcactcaacagacgtgcctcatggatcccctcccgcatctgccctggcacctggtgcccaggccacaaccactaactcccaccactcctcagacctctgcagcatcgctctcccaggcaacggcctgcccctcagtcagaaccgctcagatgcctgcccattgggtcggtctctccagcgactgtgccaggaatgcccctgaatcagcagctgctcccagacatttgctgccaagtgacacctaccggggggtgggactgacagcagtgggagcgagacgggggtgtcctgaggcggcctcaggagaacacctccaagggtgggaggctccccaaggctgtgcactggggcaccctgcctggggactcgcccaccccacagggagagcccgagctctcgtggctggcctggctcggtggaaaggggcccccagcctgccccagggatgccactccttgaacaagccctcctctgggcaccttccctcccccatctccctcaagcaccacacagggtgggcagggcaaggtgtgcctcctcatcccagagatgtgaaatggggcctggagatgcaacatggcctgcccaaggaagccagcagagtgtggtggccaggggtgcactatcaggagttggaaaacctgggttccagcagaagccccttggaccctctgagcccacatcctctctgtgagacagacggtgatgcccgacagatgctgtgcccacaagctgccctgtctccgctcatccggcaaaattctccaggtgggaggagtgcagtcacccccattggacagatgaaggtctcctccctgcaggttgaggcagggggaaaggcctcctcgaggaaagaaagaaacctccttatctcatgcgcctcatcctgatgatgtgtgagactgagtccagggtgttgaaggtctgggctattttgagttcatgggtcttataaggctgtcccttgggtgtgggactgcagtcactgtccatcatacaatttgcagaccccatagtgggcctgggtgagtcctgggagacgcagctccaggcctgactccactgctccctggcttgtgactgggagccgagcctttcaccacctggagtcctacagcggccgtcctgcttcacccacaaccctgtccctctctcactgctgtaggccttagagtgaggaccctgaaaacagactcagagacaatgtgccccagcagccagaccagatggcacctctttgctggttttgtgccagtgggtgtaagggcggtggcggaggcagggggacggtatccctctgggtgcctcaggaatgttccagacccttacagaagccccatgagttgggtagacagagactcccaccccatcccaagacagcaaagctagccctgagggcacccagcaaggaggtggcagagccagatccagaacccaggtcctcaactgagagcttgctctaacatcctacctggctgcagctcccaggaggccctcctccccacattgccctaagcttggcccagtgctctgtcaagttagtcttggttccagccacctgttcatgggctctctgacactgctgctctgctgaccctggcccatgcaggtctccaggctctgctgagctggtctcaaggctcagagtgcaagtgaggaaggacaccctcatctccctgggtgctgcttcagggaagtcccctgcatcccgggactgggagaaggggctaatcgggtcagtacagggtgaacaggatgggatcccaggtctgtctagccccagggccacctccacacaaggcacgatccccttgcctgcctgatgcaagtaggggtgcagaggccagggctgtgctgtgcatggtgagagtgaattggtgcttcatggttttctgggttcttgcctatctggctgcacaaggcctctgccccgccctccctcatccctgcaccatcacttcctgccagtctcctacagcccccagaatcatcctctccatccacaagttctcacatagatgggtgctttgttttcatatacctcatgtcatttacaagacttatgaaagagccatacaacagcagtttaaaatagtagccaaaggtcatggtaagaattcccacaaactcacatctgagggtgcctgggcttcccagcagcaaaagcaaagagggaaagatgaccagagaacaaagatgaattaggccccctacctcctacctttgctgttcacagggactctaatactttagaaatgactattttctccttcaagggaaaatggagtatttgttttttccacagatccgggcagctgatagcctctcatagaaaatggtttccaatcctctccagcctcatctcctggggctccgttccttcccagggccctgagtgtggcccaccaggtatcctgtcttcttgcctttccctggctcaaattcaaaccctcctgctgattctgatgccagccccacctccctcacaccgcgggcccactgtggggcagggcattgcaggcattcttacaagcactgaggtagattttttttttttttttatagtgtgcatgaccgaggaggaaatgaaggctcagggtgactgagggactcgcccaaggccacaaggaggtgtgtgtagggccaggatccaagtccctgagcatctcacctgcatgtcccccagggtatggaaccagtgctgttagggtttactttgtaaagccaaatcttgattgccgtctgggagccccttgagggcagggatgttgtgggatcccagagccttcctggtgtggagctaggttcctgggagatattcactaaccaggctgcctgggaataaccctgtccaagcaacagagcccagccctagcctcagggagaaggggtggcctcccagcacccttagccccagctgaggactttgtacacacagccagggttgctggctgatacactggccgtgagtgacctcagtccccctcaaggctaccaaagggccagctggcatcgtgcagcagggagacaggaagtccctaggacagctgggcctcatttgggtacatgtgcctaggctgggcacatgcaggtcgtagagtgtcacagtcacctaaaagcggggcagggtgaaaactgctgtgccctaatatcaaaggcctcatgtggctgcacccaagacctttacccccacagcacatgagctgcctggtcaccccatggatgcagagagcccgtccacctcccccagcccggatgcacccacctggtgtccatccctgactcccagggtctcctctgctgctgccggccttctccaggccccatcctggctgtgctgtggggagaggcaggcgcctggcgtggccctgctgttctcagaatgctgagctgggctgtgtgctgtgtgcttgataagctggattaggcttggggcccggcagagggactggcagggggaggttcccaggggcccagggagggcctggctgacccagcccaggcctgaacgtggtctcatttctctgaggctgtgtgacaactctacctggggccaggagactcgtgctcagctgtgagcaggaggagagacgggctgacctgaagccccctacccgc

SEQ ID NO: 1393 - DNA, 976 bp, Homo sapiens
tatccttgactaaaatcttttgctcctccctggaagctattagaattttttcttcggtcttcattttgactatagcatgatctagatgaacatttttctttatttcttgtcttcagcacgctataggccctttcagtacagggtctttcatctctttgcttttactttgggaaatttatcttcattttatctccctctttgttttttttcttcttcttcttctttccttctgggattccagctaaatgggttattttagcggttaccctaggaatcgcaataaacatacttcatacactcagaagcgaatgtgcatcttgatcctcttccagggcagcatggcgggggggcctttgagcagtttccctcccttcattcctcttcgtactgtgcagccacattctaaaatgttgtaccccacgttattcttgtttattcagctttaatttaggtgcacagtatccgttattctcagatcttccctctggggtcagtttcctcctgcctgaggtatatccttttgtgcaggtctgctggtgccaaagtaagctttttgtttgcctgaaaatgccttgatttcaccttcattctttaaagatggtctccctgggtgtataattctaggctggcagtgcatctttcaactcacggaagatatcatttgactgtcttcaagctcccatttctgttgataaggggacagctcctcggaaagtgatgtctttttaaaatctggctgcttaatagtttctctctgatttagtttcactgcatagatttaggtgcaggaatttctttgttatttttatcttcaggtacagtccctctttccttttgggactctcgctagaaatgccaaaccctgctctcaatcttgctgagcaagcttacagaaatgcagattccattgcaggaggtctgacgggagactgcactcaaactcgctcccaggagaggccagggagcctgctccagg

SEQ ID NO: 1394 - DNA, 1099 bp, Homo sapiens
gagccaccaccccagcccattatctctattgatcctcactccaaccttgcaaaataggtagcgtattccagtggagaaactgaggcacaaagaggtgaaagacctttcctgtcacagttaggaaagtggcagaagccgtatttgaaccccagcaggtctccctctgaagtccacacacgtcagcgcctctgtgttgtctctttgccagcacagggctccctggagcccagagatgggggtggtgacttgaaggggttggcaagcctgggctcctccagcgaagcattcccttggccctgggcattcctaagcgagaagaggctcaatcctattttcttctcctaattggatgccttttattcctccttcctaattgaagtctggtcattgctggttgccatggcagcagccaaagcgctcatctcactgtggcttgtctctgcctgcggccaatgggaaacctcctttcccatatacggtggggacatggagtgtcaggctgtcgtattctggtggctggaggaggagaggaagtgagatgggaggaaaaaggcctgtcctctcccacgcagagactccggacagcaggatgtgtggaatccccagtctgttttcagccaggcagcaacagcatctgtactgagttgagtctatgtgtctaccagtgggctaagaacttcatgtgcagtatctcatttaatcttcgtgatggccccaggaagataagggatcaaggcccagaaaggctaagtaagctgccaggtcatccaaggagaaaatggcaaagcctggatttgaacagagactccagcttccttatgtgtagccatctcaccatgctacttctcagggggttactatgagtgtctctcatgtccccagacccagattacaggtttggaggaatacacagcccaccttcccaatatcgcaggcaacagttccaccaaatgccctgcatggcatcacagggagcctagttgcccactgctctactgctgagctcaatgccacccagcccgggctctctcgagctagcctgcttctcaggccccactgacgtcccatggttcaccattacaaccgttcccttgcctcc

SEQ ID NO: 1395 - DNA, 1181 bp, Homo sapiens
gaaagcaggctcatttggggactgattccaagcagggttctgaagaaagagctagcccactgcgcagtggcccacctggagaggtagcagtctcctttcctgatgccagatccaagcagaggctaatgctggagaccagcgatgcccgtgggagaatccctgtagctagagggaattatctggaagtaatttatccctgtaccgccttgtggggttgggtgtttcttgcccactgcatgagttggtattactctaagagcgacagatacatgttttcacatgctttccatgtactagacactttctaggcatcagttctcaacatgacaaagagatccttctcagggaaatcagatccctcttccactgctgaaaaaccccacagtggctcccatttcacttggcataaacaccagtggccttgcagtggctgccaaggtcaaaccatctgcctttctgcttcctgctcacccttttccttcatcttctcatcttttctgtcttctccatagctcacactcccctagccacactgttctccttcctacaatgcagcacactgggcatgcttctaccccagggcccttgcaccagccgcaccatctggttgacatgcttctcccacagatacttgcttggctaactccgttgtgctctggtttttgtcaagcagtcaccttctccatgaggcccacctgggccaccatatttaacactgcagtctacactgcctctcctcccaccacccagcactcccaggccctcactctgcttcctttattttttccatttcgccagccatcttccaacacatgggaccacatccttatttattgagtgtcttgttgcaggtctctaagactgtgcctgccttgttcactgatgtatctctagcgcctacaacagggtcgggcacagagtaggagctcagtaaatacttgtggaatgaatgaatgagctcattttacctcaatcacaactccaggggtagacatggtgatttcactccattttatggttgaagctcagaagcttacggaacttgcccaaggtcacatagttagtaagtggctgagtgacgcatcaacccaaagcctgtcttactctggggtcctggatcttaaccaaaacactaagctcttccctcctccaggtgagcccctggtcctgatgcctcgagt

SEQ ID NO: 1396 - DNA, 869 bp, Homo sapiens
tgctctcgccacaggtctttctttttcaaaagcaaacagctacagtatccatcatactccagagcagccctcaaagcctgggctgttgagagtgcacatcctggcctgcggtgacagccgtcagatggtgaggggccccaggcgactgccccagcagcagggcctgggagctgcacaggggagaactcgataaggagcatcatgagcatagtgggtccattgacaacatgcagtccccacggtggtgcctaatgacaaaatgacatcatgccacctgcaaaaaaagtaaaaatgatcagaggcgagcttgtcagagaagctttgaactaggtgactgcatgaaacatctcagaggcggaagagtgcctccccctccccgggactcccacctggtgccctgagctcatcatcccttctcttgtagcatatgctgtcaatacccagggccttttcgaaacggcaatgggtccgaaggcctcgggaccacctttcacacctcccctttatgcagtgtccatacctccttggtgctcagctgctggtcagctccatgtgccctgtggtccctgccctcccaaggcctgtgaacaaatgcttagtcccagattagagtctacgtcaatctgggatgtgagctgagtggcacctgtcgtgaaccaggccagagtctacgcaatctggggtgtgagctgagtggcacctgtcgtgaacgtgcatgcacatgggcattttgtcagtctgcaccggtgaataaatgtcgctgcatttgccagctgagtgtcaccaggttccaggtcccattacacatcaggaattgtgtccgactcttctggatccgctgattggacctgagggatccctgactcgag

SEQ ID NO: 1397 - DNA, 851 bp, Homo sapiens
gtctttcttttcaaaagcgaacagtcagtatccatcatactccagagcagccctcaaagcctgggctgttgagagtgcacatcctggcctgcggtgacagccgtcagatggtgaggggccccaggcgactgccccagcagcagggcctggcacctgcacagggtagaactcgataaggagcatcatgagcatacccccccattgacaacatgcagtccccacggtggtgcctaatgacaaaatgacatcatgccacctgcaaaaaaagtaaaaatgatcagaggcgagcttgtcagagaagctttgaactaggtgactgcatgaaacatctcagaggcggaagagtgcctccccctccccgggactcccacctggtgccctgagctcatcatcccttctcttgtagcatatgctgtcaatacccagggccttttcgaaacggcaatgggtccgaaggcctcgggaccacctttcacacctcccctttatgcagtgtccatacctccttggtgctcagctgctggtcagctccatatgccctgtggtccctgccctcccaaggcctgtgaacaaatgcttagtcccagattagagtctacgtcaatctgggatgtgagctgagtggcacctgtcgtgaaccaggccagagtctacgcaatctggggtgtgagctgagtggcacctgtcgtgaacgtgcatgcacatgggcattttgtcagtctgcaccggtgaataaatgtcgctgcatttgccagctgagtgtcaccaggttccaggtcccattacacatcaggaattgtgtccgactcttctggatccgctgattggacctgagggatccctgactcgag

SEQ ID NO: 1398 - DNA, 1472 bp, Homo sapiens
tagtttaaaatacaatttaataagaaaatccgggatacattttatatgattccatttattaaagaaaaagaaacttctttccaatatattctacccaattattaaattcattttagatttttgggaagagcaaatccaacttaaaaaaaaaacttgctaggcagttgaaatcctctggttccaaagttttaaaaaatgaggcaagattgtatagtgagagtagaaaaaataagatgaagtggaatcacccatgacaatttgtcatatttgtcattacgaatttcaacatctgcaactgaaaagctacagaaatcaaaaaataaaacacaaagaagattctcaaggaccaaagactgtttgatgatgttgctctaagattttgtcctccatttatttcacacaaaaataagttaagtataaataagaagatgaggagagctggtatgtactcagatgtgttcactggtgcatagtcagagggggtgtgagaacagccaaatgtatttcttcgcccacactcactacacaaaactctcctccatgttgctgcagagtaagaaggagtccaccagccgaggctggaccaactgctgaaagtcagagtcctggaggccttcagggcagaccccagccaatctacgcagagcagcctggggagaagacagaagaggtgacacgtgtcagactgggccatgtcaggtacatgtatttccttcacctaccctgaaatgtgcatttcagaaagtggtgcatttaccagacaatttgggttgatcatcatgttagccacttggcatctcagtcaccatcttggtcacctggtcaacatagcaaccacatctcttggtcagctagctttatttgcaccttgatcactaagatagatgtcatctgaaagctgttaataatcttaataatggtctttattatttccagatccctagagtaaccttagaacagcaagaactattcattcatccataaattcagcaaggtgctatagaaagcactatggaaaaaagaggaaaagagagggagaacatattgtaaaagtagacagggattctgctactgagaaattcaacacctggcaagggggatgaacaggaaagagaggtgctggcagaataaaatcactccccagctccccacacaatgagcaatgagtatgctatttctattttgtgtccatgtgtccttgctcatattcttaatcttcagcccaatgctctacctctgagctataccccctcctccttgctcatactcttacttgtgacttgaagtgacttcctgctcctgcctattgtcacctcccccatgaaggcttccccaattatcctgaagcagagacagtccatccctccctcccctgtgcaaccagggcccctgggctgacctcaagcttctcacacttggccataactagcttttaggtatttatctcccacactagactctgagctcctcga

SEQ ID NO: 1399 - DNA, 147 bp, Homo sapiens
aaaaaaccagccaggcatggtggctcacacctgtaatcccagcactttgggaggccgaggtgggtggatcacttgaggtcaggagttcaagaccagcctggacaacatggtgaaaccctgtctctactaaaaatacaaaaattagcc

SEQ ID NO: 1400 - DNA, 111 bp, Homo sapiens
ggccaggcacggtggctcacacctgtaatcccagcactttgggaggccgaggtgggcggatcacctgaggtcaggagttcgagaccagccccgccaacatggcgaaacccc

SEQ ID NO: 1401 - DNA, 610 bp, Homo sapiens
ggaggaaagagggtggaatctggacagtatgaaggatttgtattgtacctgtaatgtttgatgtctgaagctgggtggtgggcatggctgtttgttattctccatccttttggtatgcctgatacatttcataataattttaaaaaggacaagactattgcagagaaatgcatagagtgagctctgtttgggtttttaaaatgattcctacatctatgcttgcagatgtaagcaccagccctggaaaacattgcaagggattcttagtaggcccaagctttgggaaagggcccagggggctggggagttgattaggaggggatacatgctttttcctgctgccttttgaattttgtaccacacgtagtattacttattaattaaaaaataatctgaactagccaggcgtggtggcacatacctagtctcagttacttggaaggctgaggcaggaggatcacttgagcccaggtggttgcggccagcctgggcaacatagtgagaccctgtctctttagaaaaaacaggccaggcatggtggctcacacctgtaatcccagcactttgggaggctgaggtgggtggatcacctgaggtcgggagctcgaga

SEQ ID NO: 1402 - DNA, 610 bp, Homo sapiens
ggaggaaagagggtggaatctggacagtatgaaggatttgtattgtacctgtaatgtttgatgtctgaagctgggtggtgggcatggctgtttgttattctccatccttttggtatgcctgatacatttcataataattttaaaaaggacaagactactgcagagaaatgcatagagtgagctctgtttgggtttttaaaatgattcctacatctatgcttgcagatgtaagcaccagccctggaaaacattgcaagggattcttagtaggcccaagctttgggaaagggcccagggggctggggagttgattaggaggggatacatgctttttcctgctgccttttgaattttgtaccacacgtagtattacttattaattaaaaaataatctgaactagccaggcgtggtggcacatacctagtctcagttacttggaaggctgaggcaggaggatcacttgagcccaggtggttgcggccagcctgggcaacatagtgagaccctgtctctttagaaaaaacaggccaggcatggtggctcacacctgtaatcccagcactttgggaggctgaggtgggtggatcacctgaggtcgggagctcgaga

SEQ ID NO: 1403 - DNA, 612 bp, Homo sapiens
ggaggaaagagggtggaatctggacagtatgaaggatttgtattgtacctgtaatgtttgatgtctgaagctgggtggtgggcatggctgtttgttattctccatccttttggtatgcctgatacatttcataataattttaaaaaggacaagactactgcagagaaatgcatagagtgagctctgtttgggtttttaaaatgattcctacatctatgcttgcagatgtaagcaccagccctggaaaacattgcaagggattcttagtaggcccaagctttgggaaagggcccagggggctggggagttgattaggaggggatacatgctttttcctgctgccttttgaattttgtaccacacgtagtattacttattaattaaaaaataatctgaactagccaggcgtggtggcacatacctagtctcagttacttggaaggctgaggcaggaggatcacttgagcccaggtggttgcggccagcctgggcaacatagtgagaccctgtctctttagaaaaaaacaggccaggcatggtggcgtcacacctgtaatcccagcactttgggaggctgaggtgggtggatcacctgaggtcgggagctcgaga

SEQ ID NO: 1404 - DNA, 375 bp, Homo sapiens
cagcctacaaagaacaatgatgcctgggaaccatcgccaggctacactgttgactaacaaagccacgggccccgcaagaaacaattcagtaatttccacagggttggagatgactcagcagttccactcctgcacgagcacccgagagttgccctgatagccgtgcacttgggcgttcatcacagcatttgcttcttacatgaatttttaattttggaataatttcagatttacagagaagttacaaatccaatacagagaattcttgtatactaccctgctcagttttctcctacaattaacatcttaatcatgatacatttatgaaaaccaagaaattaacattggtagaatgttgttaattaaatgacagat

SEQ ID NO: 1405 - DNA, 873 bp, Homo sapiens
tttggagctgttgggtacacctgcagaaagcctgtcacttcacacttggaagattacacagcggccaggcagaggcgcccctcacctcccagatggggcggccgggcagaggcgcccctcacctcccagacggggcggccatgcagaggcgcccctcacctcccagacgtgggcggccatgtctaggctcccctctactttcccagacagggcggccgggcagaggcgctctcccccccttttcccaaacggggcggcccggcacttggcgctctctcattttcctagacggggtcagccaatgcgataggcgctatcctcacctccgcagaacgggggcggcccagcagtggcgcccctcacctcccagacggggcggccgggcagaggcacccctcacctcccagacggggcggccaggcagagaaaggagacttcactgcccatccacgagggctggttgcatacactgcagaacatctgtgcaaaggaactggacagcctacaaagaacaatgatgcctgggaaccatcgccaggctacactgttgactaacaaagccacgggccccgcaagaaacaattcagtaatttccacagggttggagatgactcagcagttccactcctgcacgagcacccgagagttgccctgatagccgtgcacttgggcgttcatcacagcatttgcttcttacatgaatttttaattttggaataatttcagatttacagagaagttacaaatccaatacagagaattcttgtatactaccctgctcagttttctcctacaattaacatcttaatcatgatacatttatgaaaaccaagaaattaacattggtagaatgttattaattaaatgacagat

SEQ ID NO: 1406 - DNA, 375 bp, Homo sapiens
cagcctacaaagaacaatgatgcctgggaaccatcgccaggctacactgttgactaacaaagccacgggccccgcaagaaacaattcagtaatttccacagggttggagatgactcagcagttccactcctgcacgagcacccgagagttgccctgatagccgtgcacttgggcgttcatcacagcatttgcttcttacatgaatttttaattttggaataatttcagatttacagagaagttacaaatccaatacagagaattcttgtatactaccctgctcagttttctcctacaattaacatcttaatcatgatacatttatgaaaaccaagaaattaacattggtagaatgttattaattaaatgacagat

SEQ ID NO: 1407 - DNA, 898 bp, Homo sapiens
ccagaagagggattgctgggtcatatggtagtttaatttttttcagcaatctttgtattgttttccataatggctacaccaatttacattctcattaacagtgcaaaagggtttttgtttctctataccttgccaacttgttatctattgactttttgataataggctttgcatttgcctgatgattaatgatattgaacacattttcatatacctgttggccactttttatgtcttcttttgggaaatgtttgtttattctggtacttggcctattttttaattgggtttttgtttttttctttttgctattgattttcttaaatttttggatagtaacctgttatcagatatgtggttcacaaatattttctcctaatctgtagattgcctttccattttattgattatttcctttgctctgtagaagcttttcagtgtgatgtagtcctacttgtttgttcttgctttcattgcctgtcctatcagaaaaatcattgccaaggccaatatgtatcagcttctttcctatgttttctcctaggtgttttacagattcaagtcttatgtttaggtctttaatctgttttgagttgacttttgctcttggtgtaagataagggtccattttcatccttttgcatgtggatatccagttttcccaacactagatatgaaagagactaaactttacccattgtgtcttcttggtgcctttgtctaagacacttctatgacagttgtttctcagatgggtacttgtttacgtgattcacaacagtgaatggaaatgtttaccactcatcactccatctaacacaccttgttaagacacatgtaaaaactgttctaatagtaccagttgcaactataactgaaaatagtattattttagtaa

SEQ ID NO: 1408 - DNA, 306 bp, Homo sapiens
ttctttttttttttttcttttttttgagacggagtctcactctgtcgcccaggctggagtgcagtggtgtgatctcggctcactacaagctccacctcctaggttcacgccattctcctgcctcagcctcccgagtagctgggaccacaggcgcccgccaccacgcccagctaattttttgtatttttagtagagacgtggtttcgccatgttagccaggatggtctcaatctcttgacctcgtgatccacccgcctcagcctcccaaagtgctgggattacaggcatgagccaaggcacccggcc

SEQ ID NO: 1409 - DNA, 886 bp, Homo sapiens
cacgggaggcagaggttgcaatgagtcgagatcgtgccattgcactccagcctgggcagcagagcgagactccggctcaaaataataataataaattagagatggggtctcactattttgcccaggctggttttgaactcctgagctcaagggatcctctcgcctcagcctcccaaagcactgggatcacaggtgtgaggtgccatgcctggcccacaccagctgtgtttaatcaatgctgggcagccctgcagcttggtgacatcagtgggccactggctactgggtgttttttccatcctgccctgttccctgctggcaccaggggaaaaaggcccatacaggagtctgttccaggtcaccagatcctggggtggcccgtaaggatttgaaggggacaggaggcgcccctttgccgaggcccttcactgtgtcaggcacattgctggctgccgtgggtgcacaatcttagggaaccctcctgcctcctccgccttgctgcttccttgcaaagaaaatttcccactgcagagggcagcttaattgctcagcagtggctcttcagaatctcacagatgggccaggcgtggtggctcatgcctgtaatcccagcactttgggaggccgaggcgggcagatcatgaggtcaggacatcgagaccatcctggctaacatggtgaaaccccatgtctactaaaaatacaaaaaaattagccaggcgtggtggtgggtgcctgtagttccagctactctggaggctgaggcaggaggatcacttgagcccaggaggctgaggttgcagtgagctgtgactgcaccactgcactccagcctgggcaacagagcaagaccctatctcaaaaaaaaaaaaaaaaaaaaaaaaac

SEQ ID NO: 1410 - DNA, 103 bp, Homo sapiens
gaatggtgggaacctgggaggtggagtttgcagtgagccgagatcgcgccactgcactccagcctgggcgacagagcgagactccgtctcaaaaaaaaaaaaa

SEQ ID NO: 1411 - DNA, 11168 bp, Homo sapiens
cagactgacgacaacagtggagacttggacccaggagtcttgctgacagctcaaactatcacatctgagaccccaagcagcaccaccacaactcaaattaccaaggtaacagaccagctagaacctctttatggaacccaggggcaggctaagcttgctgccacctctctgcaagaaggaccctagtccataagcaaatattttcagctccatccctagtaagccacattattcaaagagtcctggatggaaaggccctgctgccttccccagcaataaatctagggagataccctgagagtatccctgcctacttagtagtctcctaaaggtaggtgtggttgttctctttacacatctgtctctctggtcagtgagtcccctgtctggctgtggaagtaagtttaaaaagtcagcatggccaggcatggtggcccacacctgtaatcccagcactttgggaggccaaggcaggtggatcacctgagatcaggagtacgagactagcctgaccaacatggtaaaaccccgtctctactaagaatacataaattagccgggtgtggcggcatacacctgtagtcccagctattcgggaggctgagggaggagaattgcttgaaaccaggaagcagagattacagtgagcagagattgcgccactgcactccagcctgggtgagcgagcagactctatctcaatagaaagttaacttaaggggccaggcgtggtgtaatcacacctgtaatcccagtactttgggaggctgagacaggtggatccctttagcccaggagtttgagattagccttggcaacatagtgaaacctcatctgtacaaaaaaatacaaaaaaaaaaaaaatgtgctgggcataatggcgcatgcctgtggtcccagctacttgggaggctgaggtgggaggatcacttgagcccagggcatcaaggctgcagtaagccgtgatcatgccactgcactccagcctgagtgacagagcaagaccctaaaacctatctctgtaaaaacaaaacaaaacaaaaagtcagcttcagggaaattatttttggtatttttatacaaccatattttccaagcccaaaatcagaactctgggtctgaggaagaatttttacagcattccagggacaaggccatgagaacttgtttggatgctgaaatattggaattattagaatgtagtttataggaagcaagagagagaaaatatctaaaattggaactacccccagaaaatcagaggcaatcgatgtttgctgtaacactagaggaaaatactttttttaataggtaagaaatatagcttcttgaccaagctctctcatcaatacacagatgactggaaactagttaacttaatgtgtctagaccttggttttcctcatctaccagaaagagaaatctactcaccctcaggagattatgtgaggaccttttgacatcaataatatgaaaatgctttaaaatacaagagcccagtttcaagctgtgtgacatatttgttcatagccttcagatttttttcctcttgaaaatgatcatggtggctcatgcctgtaatcccaacactttgggaggccaaggcgggcggatcacctgagatcaggagttcaagaccagcctggccaacatggcgaaaccccatctctactaaaaaaataaaaattagccgagcatggtggcacacgcctatagtcccagctactcgggaggcttaggcaggagaatcacttgaacccaagaggcggaggttgcagtgagctaagatcatgccactgcactctagcctgagcaacagagcaagactccatctcaaaaaaaaaaaaagaaaaagaaaatgatcaattaaaatgtatagcatcagtatccagtctctaaaacagaaatgtatgagagaagagcacagaaagtcctattttgtttacttgctagatttctgtggtattcaggaggaagaaaaaggagaaagtaaatacagaattgtgactttctgtttagcttaataaagattttagtaatccaggctgggcgcggtggctcacacctgtaatcccagcactttgggaggccggggcgggcagatcacgaggtcaagaggtcgagaccatcctagctgacaaaaaaccccgtctctactaaaaatagaaaaaattagccgggcgtggtggcaggctcctgtagtcccagctacttgggaggctgaggcaggagaatggtgtgaacccagtagacagagcttgcagtgagccgagatcgcaccactgtactccagcctgggcgacagagcaagactccgtctcaaaaaataaataaataaataaataaaaaagattgtagtaatcaaggctggatgtggtggctcacgcctgtaatccaagcactttgggaggctgaggtgggtggatcacaaggtcaggagtttgagaccagcctggccaacatagtgaaaccccatctctactaaaaatccaaaaattagctgggcatggtggtgcgtgcctgtagtcccatctactcaggaggctgaggcaggagaattgcttgaacccgggaggcagaggttgcagtgagccgagatcacaccactacactccagcctggacaacagagcgagactctgtctcaaaaaaaaaaaaaaacaaagattttaataatccaggggagtagaagtgtactctacaagggagtagaagtagcaggtctggttgagattttggacaagtaggttagaaagctgtcctttgcagtacccagcagtagattaaaatttggagtggagctttcggaataatctttgctatttttctttttttgtttgtttgtttgttaatagagacgaggtctcattatgttgcccaggctggtctcaaactcctggccgcaagcattcctcctatctcagcctcccaaagtgttgagattacaagtgtgaaccactaaacctggcctctttttctttttttttaattcttgttatatcgctgatctcatatgacatcttctctttggttccagactgtaaaaggtgggatttcagagacacgtattgaaaagagaattgtgatcacaggagatgctgatattgaccatgatcaggtgggaatgttgaagagatctgggcctgggaggggtccctgggcaggaagaccgatgaatacaggagtttgtttgccatcttcatctgcaaaaagcctctttggccactctagctcttaattgagaagaaagacaaagacaatcaaagtaagaggcctgtgggatggaggccacagattgaggagccaggaaatgtaatggaaagaacatgagctttggattccaagacttgattcaattgctggttcttaatatattctagctgttaactctctgggcctccattttgcatctgtaagatgaagatgatagtatctccctctcagggttgttgtgagaatcaggtgaaatactggatgaacagctggtggcacatggtgagctcagttaaatggagctattgttattccgaaggtaaaggtacctgaacccatgctagacaacatcaaaacaaagggaagcatgcccctacccttagagagctgtaacagccgagaagacacgagcgggagcatagtatggtggacaagacaccagcagactcgaaacttgttttctgccctacatctctaacttgctgtgtgaccttgggcaaatcacttttccgctgatttttttctcctttcctaaaagagagtgggttgatctagataatttctgggactgagtgctaaaattctatatttttatgttaattgggtgctaattgtgtgctgcaagcaattagcaaataataaggtcaggattaatgttcccagttctctgctgggtgaggttagaacagtaaagctgcagagaagagggggtggaagagattgcatgcaaatgcttctggaatcgttgactgggttgctggagcaataattctgtggcctttttatgctgatatgctgagtgcctttaaaaaaagaaaaactgagctacagtgctggcagttcccttggaggcagggttgagagttacagctgagaatagtggacacagggtcccagaaacaaggctgcaaagcctaaatatcttgcagcctgttggcccagctcagtgggtcccgctgctttagaagcctgcacccacccactcagtctggtgtgatctgagcccctgctacgtgctcagtctgcactagacagcaaaagcaatgtggtgaaaggtgtttgaggtttggagtgagacagacttgggctgaatcctgactctgcgacctaattggttatatgtccttgagcaacttatattaccaacctgagctctagttttaccatctgtaaaataaggatgatcacaggtttcttccagggtcataagggccaaacacacttggtagctcagagagatgctccagtgtccctcaggttttctagttactgagagtgcatggaaggggtaagctatggtacactctggctggcgagggaggcactttaagaactgttaaggagaagcagtgtggagcagcaggtttcatagagaggtgggcggaggcagagtcacaaagagaagacttgagctgggcctgaggtgtgagcagatgggttgggcaaacaggatcagggaggatggtcaggggcccacagaggtggtagttctaagaatgccattcatagagccaggagaccagaagagggttttccttcttcccttgccccttctagagatggttcttaagagccaggtgagtagtcagctggtcatttctagctgagtccttttccataggggagcctgcaaattcagagactgcagcccaaagaggatggtgtttttgctcttttgactttccctctgctctctttagcttttctaaagtaatcaaagctcctccagatcctcaaacagggaccccctcagaaactaaacaacagtgtggtaaagaggaaagtctgatcgacttgagttaaaatccctattgcacggctgggtgcgttggctcacgcctataatcccagtactttgggaggccgagcaaggtggatcacctgaggtcaggagttcgagaccagcctggccaaggtggcaaaacactgtctctactaaaaatacaaaaattagccagacgtggtcacggacacctgtaaccccagctacttgggaggctgaggcacaagaatcgcttgaacccaggaggcagaggtttcagtgagccaagatcacaccactgcactccagcctgggcagtgagactccgtctaaaaaaaaaaaaaaaaaaaaaaagtccctgtttcactacctactagctatgaaacagtaagctctttactgaaattcagtttcctcacctataaaatgcaaaaaattacattaccttaatgcactaagttgtcatgtttaagtaaaaagtaatgataatagttattatcttaataacaatatagttattaataaattataacttaatagagtttaagtaataagtaatgtacttaggctagtgcatggcatataacagtcccttgtcctcttccttcctttcttctactttggccaaggacatctcttcctttttcttgcacacttctttactttcctctcccgtcctgaacttgccacttacccatgctgaacacagatgttgttttgtcctttagattcacatcttgagtgaatcctctcagaccctccaggtataatgatagataatagataggtataatagataatataggccaggtgcagtggctcacacctgtcatcccagcactttgggaggccaagccaggtggatcatttgaggtcaggagttcgagaccagtctggccaacatggtgaaaccccatctctacaaaaaatacaaaaattagctgggcgtagtggtacacacccgtaatcccagctactcaggaggctgaagcaggagaactgcttgaacctgggaggcggaggttgcagtgagccgagattgcaccattgcactccagcctgggtgacggagcgagactccatctcaacaacaacaaaaaataaaaaaaaaataaaggatcatataacagatacagctatgacccccgaagtccctctccagttcctagaagacagcgctaaccttccctgtccctgtgttatcagtccagaagcctccctatgcaggatagggtgggtaaggtaattatcagcttggcttagcctaaagctgccctggtactgcagacaggagtattggatctgtcagaacatcagagaaatgatgaccactgccttccttcgccatcaggctattttctgcctcattgcccttgtttctgtcttttgtaggtccttgtacaagccatcaaggaggcaaaggagcagcacccagacatgtcagtgaccaaggtggtcgtccaccaggagaccgagattgctgatgagtgagctcaggtactgggcgttcctgctggggctgagggtgcccacagtcccagcctgagagggctctggatgggaccctcggacacactgggagcccatccccacaaagaggtgttcaccctgggacttgataaaggcagacgagaggctgatgtgggagatataggaaattaagtatttggctccaactaaagcagcctgtagcagtgccagcattattgggtaagaggagggacccaaacttggatataagcccccagctaccctctgagtcttcatgcatcctgctggagatccacttcaccttccccctctcttctctctactgctctgcttgctgctgtcacaggtctctcttttttttttttttttttttgagacggagtctcattctgtcacccaggcttgagtgcagtggcatgatcttagctcactgcaacctccgcctcccgggttcaaggaattctgccttagccttccaagaaggtgggactacaggcatgtgccaccatgcccagctaatttttgtatttttagtagagacggggtttcaccatgttggccaggttagtctcgaactcctgacctcaaatgatccacctggcttggcctcccaaagtgctgggctgggattacaggcatgagccaccgcgcctggccagtcacaggtatctttgagccagaacctgggaaagccagaggagaaaaaaccaagaagagcaggatcaggctgtctggagatgggtgggcatgcagagcagggaggtaatggctgaagctctgagaccagagtagagagctgggagcagggaagctgctttttgggaaccagggatccagataaattcatgcctaaaagtaattttaaaaagacttgaagaagccaccaatctcactaggtgggaccaggccctgtaaacctgctcacatccccattgtcactgatggccacaggaacttggcaatgggactaggaagctttttcctttgcaggattttaaattttgcttctttgttttctctaggaactaacctaccccaactctgcccttctcccatccaagagaaaccagcaaaatgataaagaagctaacctgccatagtcagacttcagactttcaagattattctaaatcaccagaaaattaatttcagtttctattgggagtttataccaagagattcttctagatctcattgatccttttgaagagctttttctatattaggatatcagaattgttcaacttttcactctatagactgttttaagagttttggggtttttttaattgggtggtttgtaaccccttcagcctagcctctctgcccatttatttccaaccccaacagacactgacagggtccacggaattcttcgggaaatcctccaaggactcttgtcagctgtgttggaggccaaagccagcttagtgggacttccgcgtctctccctagtcttatcccctttggatgatggcagaaacttcatgaaccagccctttctcagagccagtgatgtgagtgtatcagaatgccagggagggcaccagccctgatccacagacctcggaaagatgcccctgttcctttgttgcgggtggttttggtaaggcagagccctctgctgagaatgtagtattgtttttcccctctccctcctgctttctttttggagcttctttgggtcaaagacatggaagttgcttcagatatctgatactgtgaatgtttgaacatatccgtggccttcacctctccagctacccttttacctcatcagaagcagtggctcagctaagtgctccccctagctcccatctcaggagaccaaatctcacagaaaaataggcactttgggccaaaagctctaatggaacatttttagtggtgatttggggaaggaaagttaatgaggtttttaaaataaggttttctagttttgagagtgtgcacttcacacaggggaatggggttacttctgtctgatcctgggcctttctttcatcccaaatgacaaggaatgtggctcagagaagggtttttcttttttgacctttcttctctcaacaggaacctgcctgaggacacccttctagagcaaggaattgacttttaggagccgttctccccacaagacaccacatgacaaggggtataagccccagccctgctcattcccactcaccagctgaggtctgtcaggttttgaaggcttgattttgtggtgggtttggggcttagttttcctttttttcattttgatttttgaaagtgaagatgatgccctaattcctggtaaggatttggggcatagttttttgtttttttgagacggagtttcgctcttgttgcccaagctggagtgcagtggcgcgatctcggctcactgcaacctccgcctcctgggttcaggcagttctcttgcctcagcctcccaagtagctgggatgacaggcgcacaccaccacgcccagcaaattttttgtatttttagtagaaacgggatttcaccttgttaggctggtctcgaactcctgacctcaggtgatccacccaccttggcctcccaaagtgctgggattacaggtgtgagccaccacgcccggccgatttggggcatttttatttaacagaacttctctaaccttccaactgcttcccacaaacacattggcctcaaggctccttagaatcccagttccagcttcctaaaatagacagtgggtatcgggcagcagtcactggggctcaagggcagtgagcaagagaaatgtctaaagctgcttctcccaacaccgtccaaagtctccactgcctgagttttgtttcggctggtttgaactcatttcgggtgtgtgcatttttcttttggtacccatgtgagacatgaacaacaggagggagggaaagagcccaggtgggacgtgggacaggcttaggggaaagagcttgtcctatctcaggaacaaaattataggctgtgggcagagggtctgaaaggtgggctttggggtagtgcccaagcctggtcgtgttgccaggagtggtgacaagaaatgcagcttacatcaaacgaacatgtagtgcatgcccagtgcctgatggccagatggcctgtaggaagagctaccagggcttccagacctgtggaacgaagaggatggggaaaaggcagagggcactgagtgtccctttaaaaactaacacactgaatattccgtgtgatctagaacagtgtggcagctttcacagcacaggaccgttcatcgggggcctaaacgtttccctcggctctgtcaccaactcacttctctcggcttcgttgtctgtaaattggatgaaaagagctctaatgcctttcaggctcttagaagccatagatttggacaagcccagcaagatgggtgtccttccaggcctcttcccctttcctccatctctggcaacagttcttggggtttggcaattgtttggattttttttctttctgcagttgtgtgtatgtgtgtttgtgtgaagaaaaacagactctgtccaggtagaaatggtgaggagggggaagagaattacatttccagggtcagaaacttggcaacagttttcctagagtgactcagacacaccacagtaacaactctcgctgcaattttattttaatttgagaaataaagatttcctccaagccacatgaggactctggcacccacccacaaagcaagacctgtatttataagccgagggctcagggagcctaactgcgggacccgtcagggccccgtgacccatccccgtccccacccccccctccaccgctgggcccatcagtgtgtgttggggggatgcttggcagctgggggtgaggagacaacaaacctcgggaactggagccagagctgcggcctgactgacgccttttgatgctcacgggaaatttctgcccaggatctcagccccaggctggttgtttctacaaatctctctcaaatgtattattttggtgacaaaaatgaaggagctttgtaaatttttttaaaattatgaatcatatcaagtagttgtttacatttcttgaaaaaataggaactcgggcagcagaatcagattggcagaatctttagactacacaggcaataatcaagtctgctgttttggcctttcgtagtagaagtggttgtagtgtttagatatctgtttggtcttgcttcttgtattgcatttttttcaataaacaacaacaaaaagaactctctctgtgaggattgatccacttttaaatttctcttctaccagcaacttgggaaaaattaaatatgggtgggggagacctaaactcaagtcattttctaaagtaagttacccacattgaccaaaatgcagcttcaacgttgagtaaagggatttctgagagctggccaatgccttttgccagctgcagtgagattctgcagcataggccacgataaaggaaggagagaaggggcttctcagacttatttgcagaggggcccagaactcagtatgaaggcattggcagtagtgtagctctagagggatataccccagatggctgagggaagaaagggattgaggtggtaggagttcaaggctcagtccccgtcccagatggcagtggagagtctcatcccgtggtccatcttcccagaggccccacactccatcaccagtgccgccttggagggagc

SEQ ID NO: 1412 - DNA, 12212 bp, Homo sapiens
gcagacatgcaccaccacacccggctaattttgtatttttagtagagatggggtttctccatgttggtcattctggtctcaaactccccacctcaggtgatctgcccccctcggtctcccaaagtgctgggattataggcctgagccaccgtgcccggcccctgcctcctatttctgatccattcctgtcactgactcagtgctaaggaaactatacccatccaactttcttagaaggaactttgtgcccagggaatttattttattttattttatttatttatttttagacagagtctcactctgttgcccaggctggaagtacagtggcgggatcttggctcactgcaacttccacctcccaggttcaagcatttcttctgcctcagcctcccgagtagctgggattataggcaagcaccaccacgtccggctaattttgtttttttagtagacacagggtttcactctgttggccaggctggtctcaaacccctgacctcaggtgatccacccgcctacccctcccaaagtgctaggattacaggcatgagccaccgagcatggcccaatttattttatttgttaagaggttaccctgaaaaaaaaaaaaaaaagaggttaccctggccgggtgcggtagctcacacctgtaatgccagtactttgggaggccgaggcaggcggatcacctgaggtggggagtttgagaccagcctgaccaacatggagaaaccccatctctactaaaaatacaaaattagcccggtgtggtggtgcatgcctgtaatcccagctactcaggaggctgaggcaggagaattgcttgaaaccgggaagcggaggttgcagtgagctgagatcacgccactgcattccagcctgggcgacaagagtgaaactccgtctcaaaaaaaaaaaaagaggtcattctaagggaatgagatttttgcatcagaatgtgcagctgaagagcaaagctgcagcctgcaacatttgcccagtcttcctgagaggcatgatgatgagccatgctttcttctgcagactgacgacaacagtggagacttggacccaggagtcttgctgacagctcaaactatcacatctgagaccccaagcagcaccaccacaactcaaattaccaaggtaacagaccagctagaacctctttatggaacccaggggcaggctaagcttgctgccacctctctgcaagaaggaccctagtccataagcaaatattttcagctccatccctagtaagccacattattcaaagagtcctggatggaaaggccctgctgccttccccagcaataaatctagggagataccctgagagtatccctgcctacttagtagtctcctaaaggtaggtgtggttgttctctttacacatctgtctctctggtcagtgagtcccctgtctggctgtggaagtaagtttaaaaagtcagcatggccaggcatggtggcccacacctgtaatcccagcactttgggaggccaaggcaggtggatcacctgagatcaggagtacgagactagcctgaccaacatggtaaaaccccgtctctactaagaatacataaattagccgggtgtggcggcatacacctgtagtcccagctattcgggaggctgagggaggagaattgcttgaacccaggaagcagagattacagtgagcagagattgcgccactgcactccagcctgggtgagcgagcagactctatctcaatagaaagttaacttaaggggccaggcgtggtgtaatcacacctgtaatcccagtactttgggaggctgagacaggtggatccctttagcccaggagtttgagattagccttggcaacatagtgaaacctcatctgtacaaaaaaatacaaaaaaaaaaaaaatgtgctgggcataatggcgcatgcctgtggtcccagctacttgggaggctgaggtgggaggatcacttgagcccagggcatcaaggctgcagtaagccgtgatcatgccactgcactccagcctgagtgacagagcaagaccctaaaacctatctctgtaaaaacaaaacaaaacaaaaagtcagcttcagggaaattatttttggtatttttatacaaccatattttccaagcccaaaatcagaactctgggtctgaggaagaatttttacagcattccagggacaaggccatgagaacttgtttggatgctgaaatattggaattattagaatgtagtttataggaagcaagagagagaaaatatctaaaattggaactacccccagaaaatcagaggcaatcgatgtttgctgtaacactagaggaaaatactttttttaataggtaagaaatatagcttcttgaccaagctctctcatcaatacacagatgactggaaactagttaacttaatgtgtctagaccttggttttcctcatctaccagaaagagaaatctactcaccctcaggagattatgtgaggaccttttgacatcaataatatgaaaatgctttaaaatacaagagcccagtttcaagctgtgtgacatatttgttcatagccttcagatttttttcctcttgaaaatgatcatggtggctcatgcctgtaatcccaacactttgggaggccaaggcgggcggatcacctgagatcaggagttcaagaccagcctggccaacatggcgaaaccccatctctactaaaaaaataaaaattagccgagcatggtggcacacgcctatagtcccagctactcgggaggcttaggcaggagaatcacttgaacccaagaggcggaggttgcagtgagctaagatcatgccactgcactctagcctgagcaacagagcaagactccatctcaaaaaaaaaaaaagaaaaagaaaatgatcaattaaaatgtatagcatcagtatccagtctctaaaacagaaatgtatgagagaagagcacagaaagtcctattttgtttacttgctagatttctgtggtattcaggaggaagaaaaaggagaaagtaaatacagaattgtgactttctgtttagcttaataaagattttagtaatccaggctgggcgcggtggctcacacctgtaatcccagcactttgggaggccggggcgggcagatcacgaggtcaagaggtcgagaccatcctagctgacaaaaaaccccgtctctactaaaaatagaaaaaattagccgggcgtggtggcaggcgcctgtagtcccagctacttgggaggctgaggcaggagaatggtgtgaacccagtagacagagcttgcagtgagccgagatcgcaccactgtactccagcctgggcgacagagcaagactccgtctcaaaaaataaataaataaataaataaaaaagattgtagtaatcaaggctggatgtggtggctcacgcctgtaatccaagcactttgggaggctgaggtgggtggatcacaaggtcaggagtttgagaccagcctggccaacatagtgaaaccccatctctactaaaaatccaaaaattagctgggcatggtggtgcgtgcctgtagtcccatctactcaggaggctgaggcaggagaattgcttgaacccgggaggcagaggttgcagtgagccgagatcacaccactacactccagcctggacaacagagcgagactctgtctcaaaaaaaaaaaaaaacaaagattttaataatccaggggagtagaagtgtactctacaagggagtagaagtagcaggtctggttgagattttggacaagtaggttagaaagctgtcctttgcagtacccagcagtagattaaaatttggagtggagctttcggaataatctttgctatttttctttttttgtttgtttgtttgttaatagagacgaggtctcattatgttgcccaggctggtctcaaactcctggccgcaagcattcctcctatctcagcctcccaaagtgttgagattacaagtgtgaaccactaaacctggcctctttttctttttttttaattcttgttatatcgctgatctcatatgacatcttctctttggttccagactgtaaaaggtgggatttcagagacacgtattgaaaagagaattgtgatcacaggagatgctgatattgaccatgatcaggtgggaatgttgaagagatctgggcctgggaggggtccctgggcaggaagaccgatgaatacaggagtttgtttgccatcttcatctgcaaaaagcctctttggccactctagctcttaattgagaagaaagacaaagacaatcaaagtaagaggcctgtgggatggaggccacagattgaggagccaggaaatgtaatggaaagaacatgagctttggattccaagacttgattcaattgctggttcttaatatattctagctgttaactctctgggcctccattttgcatctgtaagatgaagatgatagtatctccctctcagggttgttgtgagaatcaggtgaaatactggatgaacagctggtggcacatggtgagctcagttaaatggagctattgttattccgaaggtaaaggtacctgaacccatgctagacaacatcaaaacaaagggaagcatgcccctacccttagagagctgtaacagccgagaagacacgagcgggagcatagtatggtggacaagacaccagcagactcgaaacttgttttctgccctacatctctaacttgctgtgtgaccttgggcaaatcacttttccgctgatttttttctcctttcctaaaagagagtgggttgatctagataatttctgggactgagtgctaaaattctatatttttatgttaattgggtgctaattgtgtgctgcaagcaattagcaaataataaggtcaggattaatgttcccagttctctgctgggtgaggttagaacagtaaagctgcagagaagagggggtggaagagattgcatgcaaatgcttctggaatcgttgactgggttgctggagcaataattctgtggcctttttatgctgatatgctgagtgcctttaaaaaaagaaaaactgagctacagtgctggcagttcccttggaggcagggttgagagttacagctgagaatagtggacacagggtcccagaaacaaggctgcaaagcctaaatatcttgcagcctgttggcccagctcagtgggtcccgctgctttagaagcctgcacccacccactcagtctggtgtgatctgagcccctgctacgtgctcagtctgcactagacagcaaaagcaatgtggtgaaaggtgtttgaggtttggagtgagacagacttgggctgaatcctgactctgcgacctaattggttatatgtccttgagcaacttatattaccaacctgagctctagttttaccatctgtaaaataaggatgatcacaggtttcttccagggtcataagggccaaacacacttggtagctcagagagatgctccagtgtccctcaggttttctagttactgagagtgcatggaaggggtaagctatggtacactctggctggcgagggaggcactttaagaactgttaaggagaagcagtgtggagcagcaggtttcatagagaggtgggcggaggcagagtcacaaagagaagacttgagctgggcctgaggtgtgagcagatgggttgggcaaacaggatcagggaggatggtcaggggcccacagaggtggtagttctaagaatgccattcatagagccaggagaccagaagagggttttccttcttcccttgccccttctagagatggttcttaagagccaggtgagtagtcagctggtcatttctagctgagtccttttccataggggagcctgcaaattcagagactgcagcccaaagaggatggtgtttttgctcttttgactttccctctgctctctttagcttttctaaagtaatcaaagctcctccagatcctcaaacagggaccccctcagaaactaaacaacagtgtggtaaagaggaaagtctgatcgacttgagttaaaatccctattgcacggctgggtgcgttggctcacgcctataatcccagtactttgggaggccgagcaaggtggatcacctgaggtcaggagttcgagaccagcctggccaaggtggcaaaacactgtctctactaaaaatacaaaaattagccagacgtggtcacggacacctgtaaccccagctacttgggaggctgaggcacaagaatcgcttgaacccaggaggcagaggtttcagtgagccaagatcacaccactgcactccagcctgggcagtgagactccgtctaaaaaaaaaaaaaaaaaaaaaaagtccctgtttcactacctactagctatgaaacagtaagctctttactgaaattcagtttcctcacctataaaatgcaaaaaattacattaccttaatgcactaagttgtcatgtttaagtaaaaagtaatgataatagttattatcttaataacaatatagttattaataaattataacttaatagagtttaagtaataagtaatgtacttaggctagtgcatggcatataacagtcccttgtcctcttccttcctttcttctactttggccaaggacatctcttcctttttcttgcacacttctttactttcctctcccgtcctgaacttgccacttacccatgctgaacacagatgttgttttgtcctttagattcacatcttgagtgaatcctctcagaccctccaggtataatgatagataatagataggtataatagataatataggccaggtgcagtggctcacacctgtcatcccagcactttgggaggccaagccaggtggatcatttgaggtcaggagttcgagaccagtctggccaacatggtgaaaccccatctctacaaaaaatacaaaaattagctgggcgtagtggtacacacccgtaatcccagctactcaggaggctgaagcaggagaactgcttgaacctgggaggcggaggttgcagtgagccgagattgcaccattgcactccagcctgggtgacggagcgagactccatctcaacaacaacaaaaaataaaaaaaaaataaaggatcatataacagatacagctatgacccccgaagtccctctccagttcctagaagacagcgctaaccttccctgtccctgtgttatcagtccagaagcctccctatgcaggatagggtgggtaaggtaattatcagcttggcttagcctaaagctgccctggtactgcagacaggagtattggatctgtcagaacatcagagaaatgatgaccactgccttccttcgccatcaggctattttctgcctcattgcccttgtttctgtcttttgtaggtccttgtacaagccatcaaggaggcaaaggagcagcacccagacatgtcagtgaccaaggtggtcgtccaccaggagaccgagattgctgatgagtgagctcaggtactgggcgttcctgctggggctgagggtgcccacagtcccagcctgagagggctctggatgggaccctcggacacactgggagcccatccccacaaagaggtgttcaccctgggacttgataaaggcagacgagaggctgatgtgggagatataggaaattaagtatttggctccaactaaagcagcctgtagcagtgccagcattattgggtaagaggagggacccaaacttggatataagcccccagctaccctctgagtcttcatgcatcctgctggagatccacttcaccttccccctctcttctctctactgctctgcttgctgctgtcacaggtctctcttttttttttttttttttttgagacggagtctcattctgtcacccaggcttgagtgcagtggcatgatcttagctcactgcaacctccgcctcccgggttcaaggaattctgccttagccttccaagaaggtgggactacaggcatgtgccaccatgcccagctaatttttgtatttttagtagagacggggtttcaccatgttggccaggttagtctcgaactcctgacctcaaatgatccacctggcttggcctcccaaagtgctgggctgggattacaggcatgagccaccgcgcctggccagtcacaggtatctttgagccagaacctgggaaagccagaggagaaaaaaccaagaagagcaggatcaggctgtctggagatgggtgggcatgcagagcagggaggtaatggctgaagctctgagaccagagtagagagctgggagcagggaagctgctttttgggaaccagggatccagataaattcatgcctaaaagtaattttaaaaagacttgaagaagccaccaatctcactaggtgggaccaggccctgtaaacctgctcacatccccattgtcactgatggccacaggaacttggcaatgggactaggaagctttttcctttgcaggattttaaattttgcttctttgttttctctaggaactaacctaccccaactctgcccttctcccatccaagagaaaccagcaaaatgataaagaagctaacctgccatagtcagacttcagactttcaagattattctaaatcaccagaaaattaatttcagtttctattgggagtttataccaagagattcttctagatctcattgatccttttgaagagctttttctatattaggatatcagaattgttcaacttttcactctatagactgttttaagagttttggggtttttttaattgggtggtttgtaaccccttcagcctagcctctctgcccatttatttccaaccccaacagacactgacagggtccacggaattcttcgggaaatcctccaaggactcttgtcagctgtgttggaggccaaagccagcttagtgggacttccgcgtctctccctagtcttatcccctttggatgatggcagaaacttcatgaaccagccctttctcagagccagtgatgtgagtgtatcagaatgccagggagggcaccagccctgatccacagacctcggaaagatgcccctgttcctttgttgcgggtggttttggtaaggcagagccctctgctgagaatgtagtattgtttttcccctctccctcctgctttctttttggagcttctttgggtcaaagacatggaagttgcttcagatatctgatactgtgaatgtttgaacatatccgtggccttcacctctccagctacccttttacctcatcagaagcagtggctcagctaagtgctccccctagctcccatctcaggagaccaaatctcacagaaaaataggcactttgggccaaaagctctaatggaacatttttagtggtgatttggggaaggaaagttaatgaggtttttaaaataaggttttctagttttgagagtgtgcacttcacacaggggaatggggttacttctgtctgatcctgggcctttctttcatcccaaatgacaaggaatgtggctcagagaagggtttttcttttttgacctttcttctctcaacaggaacctgcctgaggacacccttctagagcaaggaattgacttttaggagccgttctccccacaagacaccacatgacaaggggtataagccccagccctgctcattcccactcaccagctgaggtctgtcaggttttgaaggcttgattttgtggtgggtttggggcttagttttcctttttttcattttgatttttgaaagtgaagatgatgccctaattcctggtaaggatttggggcatagttttttgtttttttgagacggagtttcgctcttgttgcccaagctggagtgcagtggcgcgatctcggctcactgcaacctccgcctcctgggttcaggcagttctcttgcctcagcctcccaagtagctgggatgacaggcgcacaccaccacgcccagcaaattttttgtatttttagtagaaacgggatttcaccttgttaggctggtctcgaactcctgacctcaggtgatccacccaccttggcctcccaaagtgctgggattacaggtgtgagccaccacgcccggccgatttggggcatttttatttaacagaacttctctaaccttccaactgcttcccacaaacacattggcctcaaggctccttagaatcccagttccagcttcctaaaatagacagtgggtatcgggcagcagtcactggggctcaagggcagtgagcaagagaaatgtctaaagctgcttctcccaacaccgtccaaagtctccactgcctgagttttgtttcggctggtttgaactcatttcgggtgtgtgcatttttcttttggtacccatgtgagacatgaacaacaggagggagggaaagagcccaggtgggacgtgggacaggcttaggggaaagagcttgtcctatctcaggaacaaaattataggctgtgggcagagggtctgaaaggtgggctttggggtagtgcccaagcctggtcgtgttgccaggagtggtgacaagaaatgcagcttacatcaaacgaacatgtagtgcatgcccagtgcctgatggccagatggcctgtaggaagagctaccagggcttccagacctgtggaacgaagaggatggggaaaaggcagagggcactgagtgtccctttaaaaactaacacactgaatattccgtgtgatctagaacagtgtggcagctttcacagcacaggaccgttcatcgggggcctaaacgtttccctcggctctgtcaccaactcacttctctcggcttcgttgtctgtaaattggatgaaaagagctctaatgcctttcaggctcttagaagccatagatttggacaagcccagcaagatgggtgtccttccaggcctcttcccctttcctccatctctggcaacagttcttggggtttggcaattgtttggattttttttctttctgcagttgtgtgtatgtgtgtttgtgtgaagaaaaacagactctgtccaggtagaaatggtgaggagggggaagagaattacatttccagggtcagaaacttggcaacagttttcctagagtgactcagacacaccacagtaacaactctcgctgcaattttattttaatttgagaaataaagatttcctccaagccacatgaggactctggcacccacccacaaagcaagacctgtatttataagccgagggctcagggagcctaactgcgggacccgtcagggccccgtgacccatccccgtccccacccccccctccaccgctgggcccatcagtgtgtgttggggggatgcttggcagctgggggtgaggagacaacaaacctcgggaactggagccagagctgcggcctgactgacgccttttgatgctcacgggaaatttctgcccaggatctcagccccaggctggttgtttctacaaatctctctcaaatgtattattttggtgacaaaaatgaaggagctttgtaaatttttttaaaattatgaatcatatcaagtagttgtttacatttcttgaaaaaataggaactcgggcagcagaatcagattggcagaatctttagactacacaggcaataatcaagtctgctgttttggcctttcgtagtagaagtggttgtagtgtttagatatctgtttggtcttgcttcttgtattgcatttttttcaataaacaacaacaaaaagaactctctctgtgaggattgatccacttttaaatttctcttctaccagcaacttgggaaaaattaaatatgggtgggggagacctaaactcaagtcattttctaaagtaagttacccacattgaccaaaatgcagcttcaacgttgagtaaagggatttctgagagctggccaatgccttttgccagctgcagtgagattctgcagcataggccacgataaaggaaggagagaaggggcttctcagacttatttgcagaggggcccagaactcagtatgaaggcattggcagtagtgtagctctagagggatataccccagatggctgagggaagaaagggattgaggtggtaggagttcaaggctcagtccccgtcccagatggcagtggagagtctcatcccgtggtccatcttcccagaggccccacactccatcaccagtgccgccttggagggagc

SEQ ID NO: 1413 - DNA, 4804 bp, Homo sapiens
aggtccttgtacaagccatcaaggaggcaaaggagcagcacccagacatgtcagtgaccaaggtggtcgtccaccaggagactgagattgctgatgagtgagctcaggtactgggcgttcctgctggggctgagggtgcccacagtcccagcctgagagggctctggatgggaccctcggacacactgggagcccatccccacaaagaggtgttcaccctgggacttgataaaggcagacgagaggctgatgtgggagatataggaaattaagtatttggctccaactaaagcagcctgtagcagtgccagcattattgggtaagaggagggacccaaacttggatataagcccccagctaccctctgagtcttcatgcatcctgctggagatccacttcaccttccccctctcttctctctactgctctgcttgctgctgtcacaggtctctcttttttttttttttttttttgagacggagtctcattctgtcacccaggcttgagtgcagtggcatgatcttagctcactgcaacctccgcctcccgggttcaaggaattctgccttagcctcccaagaaggtgggactacaggcatgtgccaccatgcccagctaatttttgtatttttagtagagacggggtttcaccatgttggccaggttagtctcgaactcctgacctcaaatgatccacctggcttggcctcccaaagtgctgggctgggattacaggcatgagccaccgcgcctggccagtcacaggtatctttgagccagaacctgggaaagccagaggagaaaaaaccaagaagagcaggatcaggctgtctggagatgggtgggcatgcagagcagggaggtaatggctgaagctctgagaccagagtagagagctgggagcagggaagctgctttttgggaaccagggatccagataaattcatgcctaaaagtaattttaaaaagacttgaagaagccaccaatctcactaggtgggaccaggccctgtaaacctgctcacatccccattgtcactgatggccacaggaacttggcaatgggactaggaagctttttcctttgcaggattttaaattttgcttctttgttttctctaggaactaacctaccccaactctgcccttctcccatccaagagaaaccagcaaaatgataaagaagctaacctgccatagtcagacttcagactttcaagattattctaaatcaccagaaaattaatttcagtttctattgggagtttataccaagagattcttctagatctcattgatccttttgaagagctttttctatattaggatatcagaattgttcaacttttcactctatagactgttttaagagttttggggtttttttaattgggtggtttgtaaccccttcagcctagcctctctgcccatttatttccaaccccaacagacactgacagggtccatggaattcttcgggaaatcctccaaggactcttgtcagctgtgttggaggccaaagccagcttagtgggacttccgcgtctctccctagtcttatcccctttggatgatggcagaaacttcatgaaccagccctttctcagagccagtgatgtgagtgtatcagaatgccagggagggcaccagccctgatccacagacctcggaaagatgcccctgttcctttgttgcgggtggttttggtaaggcagagccctctgctgagaatgtagtattgtttttcccctctccctcctgctttctttttggagcttctttgggtcaaagacatggaagttgcttcagatatctgatactgtgaatgtttgaacatatccgtggccttcacctctccagctacccttttacctcatcagaagcagtggctcagctaagtgctccccctagctcccatctcaggagaccaaatctcacagaaaaataggcactttgggccaaaagctctaatggaacatttttagtggtgatttggggaaggaaagttaatgaggtttttaaaataaggttttctagttttgagagtgtgcacttcacacaggggaatggggttacttctgtctgatcctgggcctttctttcatcccaaatgacaaggaatgtggctcagagaagggtttttcttttttgacctttcttctctcaacaggaacctgcctgaggacacccttctagagcaaggaattgacttttaggagccgttctccccacaagacaccacatgacaaggggtataagccccagccctgctcattcccactcaccagctgaggtctgtcaggttttgaaggcttgattttgtggtgggtttgggacttagttttcctttttttcattttgatttttgaaagtgaagatgatgccctaattcctggtaaggatttggggcatagttttttgtttttttgagacggagtttcgctcttgttgcccaagctggagtgcagtggcgcgatctcggctcactgcaacctccgcctcctgggttcaagcagttctcttgcctcagcctcccaagtagctgggatgacaggcgcacaccaccacgcccagcaaattttttgtatttttagtagaaacgggatttcaccttgttaggctggtctcgaactcctgacctcaggtgatccacccaccttggcctcccaaagtgctgggattacaggtgtgagccaccacgcccggccgatttggggcatttttatttaacagaacttctctaaccttccaactgcttcccacaaacacattggcctcaaggctccttagaatcccagttccagcttcctaaaatagacagtgggtatcgggcagcagtcactggggctcaagggcagtgagcaagagaaatgtctaaagctgcttctcccaacaccgtccaaagtctccactgcctgagttttgtttcggctggtttgaactcatttcgggtgtgtgcatttttcttttggtacccatgtgagacatgaacaacaggagggagggaaagagcccaggtgggacgtgggacaggcttaggggaaagagcttgtcctatctcaggaacaaaattataggctgtgggcagagggtctgaaaggtgggctttggggtagtgcccaagcctggtcgtgttgccaggagtggtgacaagaaatgcagcttacatcaaacgaacatgtagtgcatgcccactgcctgatggccagatggcctgtaggaagagctaccagggcttccagacctgtggaacgaagaggatggggaaaaggcagagggcactgagtgtccctttaaaaactaacccactgaatattccgtgtgatctagaacagtgtggcagctttcacagcacaggaccgttcatcgggggcctaaacgtttccctcagctctgtcaccaactcacttctctcggcttcgttgtctgtaaattggatgaaaagagctctaatgcctttcaggctcttagaagccatagatttggacaagcccagcaagatgggtgtccttccaggcctcttcccctttcctccatctctggcaacagttcttggggtttggcaattgtttggattttttttctttctgcagttgtgtgtatgtgtgtttgtgtgaagaaaaacagactctgtccaggtagaaatggtgaggagggggaagagaattacatttccagggtcagaaacttggcaacagttttcctagagtgactcagacacaccacagtaacaactctcgctgcaattttattttaatttgagaaataaagatttcctccaagccacatgaggactctggcacccacccacaaagcaagacctgtatttataagccgagggctcagggagcctaactgcgggacccgtcaggggcccgtgacccatccccgtccccacccccccctccaccgctgggcccatcagtgtgtgttggggggatgcttggcagctgggggtgaggagacaacaaacctcgggaactggagccagagctgcggcctgactgacgccttttgatgctcacgggaaatttctgcccaggatctcagccccaggctggttgtttctacaaatctctctcaaatgtattattttggtgacaaaaatgaaggagctttgtaaatttttttaaaattatgaatcatatcaagtagttgtttacatttcttgaaaaaataggaactcgggcagcagaatcagattggcagaatctttagactacacaggcaataatcaagtctgctgttttggcctttcgtagtagaagtggttgtagtgtttagatatctgtttggtcttgcttcttgtattgcatttttttcaataaacaacaacaaaaagaactctctctgtgaggattgatccacttttaaatttctcttctaccagcaacttgggaaaaattaaatatgggtgggggagacctaaactcaagtcattttctgaagtaagttacccacattgaccaaaatgcagcttcaacgttgagtaaagggatttctgagagctggccaatgccttttgccagctgcagtgagattctgcagcataggccacgataaaggaaggagagaaggggcttctcagacttatttgcagaggggcccagaactcagtatgaaggcattggcagtagcgtagctctagagggatataccccagatggctgagggaagaaagggattgaggtggtaggagttcaaggctcagtccccgtcccagatggcagtggagagtctcatcccgtggtccatcttcccagaggccccacactccatcaccagtgccgccttggagggagc

SEQ ID NO: 1414 - DNA, 661 bp, Homo sapiens
acctcccagtcttaggggcccttgcccaccactttcttgggtttgccaagacactgggtacatctcccagtcaccctggcctggacctccagccctgttagggctaaggccacttacagaggctgaagaaattcctgaggcgagtcctccacaccccacagtgaaacgcaccctctccagctcactgagccctggtgcagctggcatttctctgcccgcatgcaggtcaggatgcccttcacagctgctgtggtcagagcatccatccccagcctgggatgtgactgaaacatctattagacgttgggactcctggtcctttggtcctattagcatggtccatgctgcagcctcagagcaggctgtctcccctctcttcagacccgggcccccaagtcccctcctcctcccaatttggcatagcccccaagactgaggcggtccagccgtggccagcttcggtgagcacagtcccgagctgctggggccccaaggaggagctccccaaggcccagatccagagacttggaatgttcaatgcaggagccagacggctgcacggtgatgatcacatggccagtctgcgtccgtggaccccagggtgggggcagcccggggcccttcagcgggtagctgttgagcaaggcaggtaaccccaagc

SEQ ID NO: 1415 - DNA, 124 bp, Homo sapiens
gcggatcacctgaggtggggagtttgagaccagcctgaccaacatggagaaaccccatctctactaaaaatacaaaattagcccggtgtggtggtgcatgcctgtaatcccagctactcaggag

SEQ ID NO: 1416 - DNA, 661 bp, Homo sapiens; identical to SEQ ID NO: 1414

SEQ ID NO: 1417 - DNA, 518 bp, Homo sapiens
cctggctttttttttttttttttttttttttgagacagagtctcgctctgtcgcccaggctgaagggcagtggcgcgatctcggctcactgcaagctccgcctcccaggtttacgccattctcctgcctcagcctcccaagtagctgggactacaggtgcctgccaccacacctggctaattttttgttttttagtagagacggggtttcaccgtgttagctaggatggtctcgatctcctgacctcgtgatccacccgcctcggcctcccaaagtgctgggattacaggcgtgagccaccgtgcctggccccggctaatttttttgtatttttagtagagatggggcttcgccatgttggccaggctggtctcaaactcctgacctcaagtgatcagcccgcctcagcctcccaaagtgctaggactataggtgtgagccaccaagcccggcctgtgaaccaacttttatcaccttctccagttccagaaactaaataataatttggatagtttacc

SEQ ID NO: 1418 - DNA, 661 bp, Homo sapiens; identical to SEQ ID NO: 1414

SEQ ID NO: 1419 - DNA, 875 bp, Homo sapiens
gacctcatcttaatgaattaagtctgggaatataattatgtctgggaatataatagagaagactctatttcctgtgttctgggtgagtatgaacttttgggggatactaacttactatatactcactaggttaatctatgctaaatacccaacaggaaggcagctgtagggaaaagcaagagtatgaaacctggaaaaacaattgccagactctgctgcttgtgggtatgtggccgtgggtaaggtagttgctctgtgctttcagcttcctcatgtacaaaattgagataataatgatgcccactttgtggaattcttgtaaagatgaaaagattccaaatatgtaaagtgcatagaacaatccccagcaaaaagtggaacatgttagtgataattgctgtcatagtcggtcttcttgcttagtaggcctgagataaaactttctcctatttcatccctcctcctccctcttcctgattttacatgttatttagttgtttctccctctcactataattatttgtgagaagttacaagagttatactatggtagagcagacaggctttgcacaccttcagggtcagttctggaccaaaccactcagaaaccactgcacggatgaatggctggagattgtggggcctattgtgtctccaggtggctgtggttacatgggatccctggaatgttaattaattttcatatttccctttaaggtacttctgtggctcaaacaatgaatttctgagttaggtcccaaagtggcatttttgtttgccaacaccctcataggaaactgtattagaagctttcttgtaatatttaagagcctttaaaagagcgagactccgtctccaaaaaaaacaaaaaaaaa

SEQ ID NO: 1420 - DNA, 524 bp, Homo sapiens
caagaaatgccttctgtctcagggaagcccttaccagaacctctaggtagagttagaggctaactccacggcaccctagagtccatagcatgttgttatcatgtgtgtatcgttgcatgtaaaaatattcctatttgttacggtttgcttgtatgtgtttgtcattaatctattaattcattcagtgaagagatgccaacttgtatactagcctgggaaacctctgtgtcctcagtgcctaatttaatactcctttttctatctagtagtaaaatgaatatgaatgtacatgtctgaggtctctataaattaaaaggtaaaaagtcttaagccaggtgtggtggcatgcacctgtattcgcagatatttgggaggttgaggtgggagcattgcttgaggccagaagtttgaggctgtagtgtgcaatgctcttacctgtgaatagccatggccctccaacatgggcaatgcagtgagaccctgtctttaaaaaaaaaaaaaaaaaaaaaaaaaaaaagaaaaaa

SEQ ID NO: 1421 - DNA, 561 bp, Homo sapiens
gaatcatcagagatgaaactgtttgagagactcatgtgaccttacgaaaattacaacagcagtcttaaagtatgaaaaagatgcatcacagcagagacattatggcccagttgatatcaaatgtaaaatgtaaatgcatgtaaatgcacacttcattttatgtattatttagtaatttgcagtggtatgtgtttaatatttttgctacctacacattaggcaaaaaaaagatgtaaataatttgggagaaaaagaggaagaacagtgtaaaataaaactttctataagtactccatttcaatgtgttcaacatcatcctaaaaggcaagattttcccacgcaggtgacaaggtggtttatgtactatttaagggcggaaggtgcgtgcccgttcaataagcatgttttttgccaggtaggaaatatgttccatatctttacttatcattgcatttcagatgggaactagaaaaactggagagaaaaatgtaatgaaactgctgctgtaaattattccttttagcatgtattcacttgctaaatacacatttcttcaaaata

SEQ ID NO: 1422 - DNA, 561 bp, Homo sapiens; identical to SEQ ID NO: 1421

SEQ ID NO: 1423 - DNA, 561 bp, Homo sapiens; identical to SEQ ID NO: 1421

SEQ ID NO: 1424 - DNA, 1741 bp, Homo sapiens
gaaaaatggaatacactgatctactactgatgtcttctttcagctttgatctaaagatgtattttattaaaactataatttaaatgtaccatgaaaaatatgcagtaaaaattagttgttttctaagctagagtaggatttgtcttacaattattgtgctatgtagtttttgttttaaaaattccaatggtgtgctgctttctttggacattttattttcaattctataagagggatagatgacattgttctagaaacacatatacatcattaagagtgaatctctaaaaccaggatataaattatgctttatttctctgagaaaatcaaacaaatggaagctgttcacacctccccttctttaagcattatctaaattaatttttacttgcataatgttcttagaaaaaaaaacagaacatttaagcaggaaaaaaggaagaaacaagttgatttttaagtgcattttactataatgaatcaatgaagggaaaaggaactgcatatttcatgaaaataataagcattgtcttaatatactgttaatagaaaatgtgtcttaattccgtgcttgaatccctgcatgatatttgagactaagatctctcttatgattctaccaagaattatatctgtgtcacttaatttttttaaaagagagagatcaataactattcagagcaacatgttaaaggcaaagtttccaatcatttacatctgtatcaggtgcctcttacctttccttatttaagacaattatttgtacaagaaacacatgactcttttcatatcaatgggagggacttttctacaaagtattttccaggatgcaacccacatttaaacaatgtaaaattctttgtttcctgcaacaacttacaaaataaggtaaaagactaaaattcaagatttgcttccttcattgtcctaagacgattcgttgagaatcactgactttgagatatttaaaactttcagcattatactgtggtttcttttgcactgcactcacctattcaggactcctcccccaggttcctcatcatgcacaaaaatgcaaagaaaacatcttattagtaattaatgaagcaacattgaaattctaactctagctgtctttggattctaattaactcagcatcaatttctcacctcagactacagtgaatttttatttcctatcagctgaaatatttcacagatggaagctcatgtttcagttttaatgactgccttgaataaacaagttgttgccacttgtttcaaacaaaagcctaaaaataatctacattcaattttaggctccattgactaatatggtgttgcttttggaagtactgtatatcctcacatggaagccaaattgttaaattatttgaaggacacaccactgtacagaaagtagtgtttcaaatataaatcgaagaacaaagagtgctccaaaaaataggtcattcttttattttcataaagtatctaaactgtactaacattcagtgttgtgtttcattctaaatttgcagctgaaataaatttatttgcgatagcagaaatatcttattattcatcctcagaaataaaggatttgaagggatagagattatatgataaatttatagaagactttcagaatttgaatgcattttgtttagtgttatgaaatgacaatagaaaaaagtctcgacttcaattaaaagttacacaaacaaacaaatctacaggcatgtctttatataccatc

SEQ ID NO: 1425 - DNA, 354 bp, Homo sapiens
ctgggttctatatttatggtgatgatgtgaatttttatgccctttaaattaagtattgttctttttaatgtcatacctaaaaaggaaatgtagggataaatttttataatgtgtcattttcataatcagtttggttttattcaggatccacaaagatgtcagatgactgttattgaaattgcttatcttaaaggtcacagacaagcattttattaatatggagccactagtataatatgttaaaatctttgttttattagctcattttaaaacacaatttccattcaatttaatgaaactgtatcaggtttcatggtttcaaagacagacttaaataggattcaacacccccgt

SEQ ID NO: 1426 - DNA, 1741 bp, Homo sapiens
gaaaaatggaatacactgatctactactgatgtcttctttcagctttgatctaaagatgtattttattaaaactataatttaaatgtaccatgaaaaatatgcagtaaaaattagttgttttctaagctagagtaggatttgtcttacaattattgtgctatgtagtttttgttttaaaaattccaatggtgtgctgctttctttggacattttattttcaattctataagagggatagatgacattgttctagaaacacatatacatcattaagagtgaatctctaaaaccaggatataaattatgctttatttctctgagaaaatcaaacaaatggaagctgttcacacctccccttctttaagcattatctaaattaatttttacttgcataatgttcttagaaaaaaaaacagaacatttaagcaggaaaaaaggaagaaacaagttgatttttaagtgcattttactataatgaatcaatgaagggaaaaggaactgcatatttcatgaaaataataagcattgtcttaatatactgttaatagaaaatgtgtcttaattctgtgcttgaatccctgcatgatatttgagactaagatctctcttatgattctaccaagaattatatctgtgtcacttaatttttttaaaagagagagatcaataactattcagagcaacatgttaaaggcaaagtttccaatcatttacatctgtatcaggtgcctcttacctttccttatttaagacaattatttgtacaagaaacacatgactcttttcatatcaatgggagggacttttctacaaagtattttccaggatgcaacccacatttaaacaatgtaaaattctttgtttcctgcaacaacttacaaaataaggtaaaagactaaaattcaagatttgcttccttcattgtcctaagacgattcgttgagaatcactgactttgagatatttaaaactttcagcattatactgtggtttcttttgcactgcactcacctattcaggactcctcccccaggttcctcatcatgcacaaaaatgcaaagaaaacatcttattagtaattaatgaagcaacattgaaattctaactctagctgtctttggattctaattaactcagcatcaatttctcacctcagactacagtgaatttttatttcctatcagctgaaatatttcacagatggaagctcatgtttcagttttaatgactgccttgaataaacaagttgttgccacttgtttcaaacaaaagcctaaaaataatctacattcaattttaggctccattgactaatatggtgttgcttttggaagtactgtatatcctcacatggaagccaaattgttaaattatttgaaggacacaccactgtacagaaagtagtgtttcaaatataaatcgaagaacaaagagtgctccaaaaaataggtcattcttttattttcataaagtatctaaactgtactaacattcagtgttgtgtttcattctaaatttgcagctgaaataaatttatttgcgatagcagaaatatcttattattcatcctcagaaataaaggatttgaagggatagagattatatgataaatttatagaagactttcagaatttgaatgcattttgtttagtgttatgaaatgacaatagaaaaaagtctcgacttcaattaaaagttacacaaacaaacaaatctacaggcatgtctttatataccatc

SEQ ID NO: 1427 - DNA, 354 bp, Homo sapiens; identical to SEQ ID NO: 1425

SEQ ID NO: 1428 - DNA, 1102 bp, Homo sapiens
gacccttgatagcttttctagtaccatgtggatttctagagaagggaatattcccagaggaaacaggggcaccaaacaacaaatatcaagtatacatgttaagacaggtttttttcttcccgctatgtttagggccagtaagaggtctcttaaggacagtcagtgtgattgaagggttatacagttttcagctttgaacagtattggatcaaaattgattttgcttttaatattgacatctattattgctcagtgatggatatactgcgttggtgggtatattgtagcagatactgttacttcttctttttatatgtttaaagtatttcataattttaataaaatagaaaattaactttgctttgatttaagttggtgaataataacaaatatttgggttataatttccctttagtattaagttagctgtagaaatggtgttgtatctgacctagtaacccatttgactttttaaagatgaattactaaatttttttaatgatatgaaaaaatgtaatttgctccctttacctcttatcaatatatttatgataccataggtacctgcaaggtgtggagttacagtccgagacagtctaaagaaagcactgatgatgagaggtctaatcccagagtgctgtgctgtttacagaattcaggatgggtatggtttgtatgtgacgtgaaattttgtttaaaaagaaaatcacacattaaactttgaagttttcttaggatctttaccaaaacctagggaattgaaagtgtactttaggaaaaagtattaaaataatactaagttagcctgaagaaatactgtaggccatatgaggagttaaataattgtatatgactgtagggtttgttactttgatcaaatgattttatttggaatttgagattcttacaatttttgaaccattcagagtgtgatttatttggataatagactcttacccccctcccatttttaatacaaactcatagtttcacaaaaggtatatcaaaattaacattttatattgacctacttttctttcagaaagtgtctaacattgttccaagaccctcacattttgaatcctctttaaaaaaaaaaaaa

SEQ ID NO: 1429 - DNA, 3919 bp, Homo sapiens
cacttttagtacagcatttccaggaactatgtatcagcatataaaaatgcacagaaggattctcggacatctatctgctgtttactgtgtagcatttgataggacaggacatagaatctttacagtgagtaaaaattttaaacttgatttgatgtcatctagagtactttagtgtgcttcagaatcatctaggaaatcttagtttctgtttcccatcctcagagattttgactcagtaggtatggtgtgggtctcacgaatttgtatttttaataagtgcttcagctgaagataggactctgtgctgttttgaaagacagtgatttagagtagtcgttcttaaatgtgatatttaaggatgcttaaaaatagacatacctggccgggcgcggtggctcacgcctgtaatcccagcactttgggcggccgagacaggcggatcacgaggtcaggagatcgagaccatcctggctaacacggtgaaaccccatctctactaaaaatacagaaaaattagccgggtgtggtggtgggcgcctgtagtcccagctactcgggaggctgaggtaggagaatggcgtgaacctgggaggtggagcttgcagtgtgcagaaatcgccccactgctctccagcctgggcgacagagcgagattccgtctcaaaaaaaaaaaaaaaaaaaaaaaaaaaaacatagacatacctaacactttccctctagcacattctagacttactgaattagattacattgtaattaaatatatgtattaactgtaaaccccccaaaataaaaagctcctcagacctctacaagtgattcatgttcacattaatcactggttcaggaaaatgggttgattataaaataacccattagtgttcaagtaagtattaaaaacctatctgaaaaaatttggaatttatcattttaatgttttaagcgtaagttaggagaggtgagaagtttaactttcattttgtgggtgtaaaattcaagagtagataatcaaatgtttcttgaatgggtgctggctagtactgtaaacttgagactgtgttcgtgaggaggctattcccaccacttttgtttgtttttgggattgccacttagtcctgtttctcacactatgaagtatagatctgttccaacattcatcacattcatcacattatatagcttgatgtgaatagactttttttttttttttttgagacggagtctcactctgtcacctaggctggagtgcagtggcgcaatctccgctcactgcaagctctgtctcctgggttcacacaattctcctgcctcagcctcttcagtagttgggactacaggtgccagccaccacgcccggctaattttttgtattttttagtagaaaggtttcactgccttagccaggatggtctcgatctcctgaccttgtgatccgcccacctgggcctcccaaagtgttgggattacaggcgtgagccactgtgcctggcctagactaacatttaaccattgttagttgatataagagagccgtgaactttgagttggacttactactttgcagagaacttgggggaaaatagtattggtaatggagtctgacccgtagaaatgataactcggcagtatctttatgtagactgtctttgccttaaagaaaaatactattattccataggtgttctgaccatagtcataatttattacataaataagagagtattctatagttggaaagagttaaagttaatttggatggcatataaaaggtattcttttaatatttaaaagatttgctgtactaacattaatttttggatatattttttcttagggttcagatgactgtttggtaaagatttggtcaacacataatggccgcttgttatctacattaagaggtcattctgcagaaatttcagatatggcagtaaactatgagaatacaatgattgctgcggggagctgtgataaaattattagagtgtggtgcttgagaacttgtgccccagttgctgtgctccaaggacacacaggatcaattacatctttacaggtaaacttgtagcttagtgggcacattcctatatgtattttcacctttttctttaaaacagtttctttggaattgagaaatagtaagatgtgtattagttatgttttaagtaagagaagtgataatcattcatacaaatcatacaaatcatggaaggctgatgaaatgaagatctaatgcatatttacatgaaggcttattgatattttggggtttatggttgaactggatgagtgtcaattagaaactggtgatagattaattatttttcaactttaaaacttgtggattttgctaagttgatttttttttttttttgagactgagtcttgttctgttgcccaggctggagtgcagtggtgtgatctcagctcgctgcaacctctgcctcctgggttcaagcgattcttgtgcctcagcctcccgagtagctagaattacaggtgtccaccaccacacccggctaatttttgtatttttagtagagacagggtttcaccatgttgggcaggctggtctcgaactcctgaccaagtaacctgcccggctcagcctcccaaagtgctgggattacaggcgtgagccaccgtgccgcttagttgatttaatttaccaaaatatttaaagtttttttcacaataagcagaggataattttgaacctatacagagtagacagaattgtataaacccctatgtatctgtcaacccatggccaattctttcctaactgcttcatcttgtacctaaagcgaatcctaggttttatataatttcttctgcaaatatttcattctgtatttctaaaagataaggattcccctccccactttttttcatagtgacggttatgatggaaggaaaagattcctttttaaaaaaactgcaacaccattatcacactatttattgatgttcaagtttccagttgtctcataatggtattttatttaggttgtttgaatcaggagcaaaacgaagcctgcatgttacaattggttgctgtagaataaaagaaacttaaaatataaatttcacctatctatgcagtttaaaaaaaattcgcttgcagtttcttcgttgaaggacctaggttatctatagtttccccacagtttggatgttgcccattgtatcctgttggagtagtttaatatgttcctctgtatttctgttaagttggttattggatgtagagcagtggttctctttaatgtgcatgagaatcacctggagggcttgattaaaacattgttaggcactactcccaaagtttctgatttcaaaacgtctggggcgagggtatgagtatttcatcactgatagagaattgatcatcttgggatgtaagttcttccatcagaaggcacaaaatgtctagtgttttttgtattactcactgatgatcattgccttacatccgttagttattagggacagaaaatgttactcttactagtgcacggttcttggctgtcagtgtaacagaaattaataggaggctaggcagacttcccagacaagatttattaagacttatgctgagatttattaagacttgtgcctagcgatggctcatgcctataatcccagcactttagggaggctgaggtgggaggatcacttgagctcacaggtttgagacccggcctgggcaacttagtgagacccccccccccacccccacccaccccccacaaaaaatagtttggcaaggtagcacacgcctgtagtctcggtactcctgaggttgagggaggattgcttgagccaggaggttgaggctgcagtgagccgttatcgcaccagtgcattccagcctgggtgacaaagtgagactgcctcaaaaaataaaaataaaaaa

SEQ ID NO: 1430 - DNA, 3919 bp, Homo sapiens
cacttttagtacagcatttccaggaactatgtatcagcatataaaaatgcacagaaggattctcggacatctatctgctgtttactgtgtagcatttgataggacaggacatagaatctttacagtgagtaaaaattttaaacttgatttgatgtcatctagagtactttagtgtgcttcagaatcatctaggaaatcttagtttctgtttcccatcctcagagattttgactcagtaggtatggtgtgggtctcacgaatttgtatttttaataagtgcttcagctgaagataggactctgtgctgttttgaaagacagtgatttagagtagtcgttcttaaatgtgatatttaaggatgcttaaaaatagacatacctggccgggcgcggtggctcacgcctgtaatcccagcactttgggcggccgagacaggcggatcacgaggtcaggagatcgagaccatcctggctaacacggtgaaaccccatctctactaaaaatacagaaaaattagccgggtgtggtggtgggcgcctgtagtcccagctactcgggaggctgaggtaggagaatggcgtgaacctgggaggtggagcttgcagtgtgcagaaatcgccccactgctctccagcctgggcgacagagcgagattccgtctccaaaaaaaaaaaaaaaaaaaaaaaaaaaacatagacatacctaacactttccctctagcacattctagacttactgaattagattacattgtaattaaatatatgtattaactgtaaaccccccaaaataaaaagctcctcagacctctacaagtgattcatgttcacattaatcactggttcaggaaaatgggttgattataaaataacccattagtgttcaagtaagtattaaaaacctatctgaaaaaatttggaatttatcattttaatgttttaagcgtaagttaggagaggtgagaagtttaactttcattttgtgggtgtaaaattcaagagtagataatcaaatgtttcttgaatgggtgctggctagtactgtaaacttgagactgtgttcgtgaggaggctattcccaccacttttgtttgtttttgggattgccacttagtcctgtttctcacactatgaagtatagatctgttccaacattcatcacattcatcacattatatagcttgatgtgaatagactttttttttttttttttgagacggagtctcactctgtcacctaggctggagtgcagtggcgcaatctccgctcactgcaagctctgtctcctgggttcacacaattctcctgcctcagcctcttcagtagttgggactacaggtgccagccaccacgcccggctaattttttgtattttttagtagaaaggtttcactgccttagccaggatggtctcgatctcctgaccttgtgatccgcccacctgggcctcccaaagtgttgggattacaggcgtgagccactgtgcctggcctagactaacatttaaccattgttagttgatataagagagccgtgaactttgagttggacttactactttgcagagaacttgggggaaaatagtattggtaatggagtctgacccgtagaaatgataactcggcagtatctttatgtagactgtctttgccttaaagaaaaatactattattccataggtgttctgaccatagtcataatttattacataaataagagagtattctatagttggaaagagttaaagttaatttggatggcatataaaaggtattcttttaatatttaaaagatttgctgtactaacattaatttttggatatattttttcttagggttcagatgactgtttggtaaagatttggtcaacacataatggccgcttgttatctacattaagaggtcattctgcagaaatttcagatatggcagtaaactatgagaatacaatgattgctgcggggagctgtgataaaattattagagtgtggtgcttgagaacttgtgccccagttgctgtgctccaaggacacacaggatcaattacatctttacaggtaaacttgtagcttagtgggcacattcctatatgtattttcacctttttctttaaaacagtttctttggaattgagaaatagtaagatgtgtattagttatgttttaagtaagagaagtgataatcattcatacaaatcatacaaatcatggaaggctgatgaaatgaagatctaatgcatatttacatgaaggcttattgatattttggggtttatggttgaactggatgagtgtcaattagaaactggtgatagattaattatttttcaactttaaaacttgtggattttgctaagttgatttttttttttttttgagactgagtcttgttctgttgcccaggctggagtgcagtggtgtgatctcagctcgctgcaacctctgcctcctgggttcaagcgattcttgtgcctcagcctcccgagtagctagaattacaggtgtccaccaccacacccggctaatttttgtatttttagtagagacagggtttcaccatgttgggcaggctggtctcgaactcctgaccaagtaacctgcccggctcagcctcccaaagtgctgggattacaggcgtgagccaccgtgccgcttagttgatttaatttaccaaaatatttaaagtttttttcacaataagcagaggataattttgaacctatacagagtagacagaattgtataaacccctatgtatctgtcaacccatggccaattctttcctaactgcttcatcttgtacctaaagcgaatcctaggttttatataatttcttctgcaaatatttcattctgtatttctaaaagataaggattcccctccccactttttttcatagtgacggttatgatggaaggaaaagattcctttttaaaaaaactgcaacaccattatcacactatttattgatgttcaagtttccagttgtctcataatggtattttatttaggttgtttgaatcaggagcaaaacgaagcctgcatgttacaattggttgctgtagaataaaagaaacttaaaatataaatttcacctatctatgcagtttaaaaaaaattcgcttgcagtttcttcgttgaaggacctaggttatctatagtttccccacagtttggatgttgcccattgtatcctgttggagtagtttaatatgttcctctgtatttctgttaagttggttattggatgtagagcagtggttctctttaatgtgcatgagaatcacctggagggcttgattaaaacattgttaggcactactcccaaagtttctgatttcaaaacgtctggggcgagggtatgagtatttcatcactgatagagaattgatcatcttgggatgtaagttcttccatcagaaggcacaaaatgtctagtgttttttgtattactcactgatgatcattgccttacatccgttagttattagggacagaaaatgttactcttactagtgcacggttcttggctgtcagtgtaacagaaattaataggaggctaggcagacttcccagacaagatttattaagacttatgctgagatttattaagacttgtgcctagcgatggctcatgcctataatcccagcactttagggaggctgaggtgggaggatcacttgagctcacaggtttgagacccggcctgggcaacttagtgagacccccccccccacccccacccaccccccacaaaaaatagtttggcaaggtagcacacgcctgtagtctcggtactcctgaggttgagggaggattgcttgagccaggaggttgaggctgcagtgagccgttatcgcaccagtgcattccagcctgggtgacaaagtgagactgcctcaaaaaataaaaataaaaaa

SEQ ID NO: 1431 - DNA, 237 bp, Homo sapiens
ctggtcacttaaatagatttggtgtgaaattttatgataaaaggtgacttttgttctagtcagtattctcaaagaaaagagagtgagtagctattttgggatgaagatagttataactgagatagcggtttttgtttttgttttttgtttttggcccaggcggagtgctgtggtgcagtcatggctcactgtaacctcagcctggggtcaaggtctgcccatctcaacctctcgagt

SEQ ID NO: 1432 - DNA, 302 bp, Homo sapiens
ttaaagactgcaggcacacagtttggaagggctctgcctttgctgctcttcatagaggaagacctcctgaaatgccagtgaattatggttccccaccaaatcttggtaagtaaggttggcctttgagatgcctgaaataattgtttttaaatttctcaacaacctttataaatgctgtattaaaatttaaaaggaaatactggttgaaatgttgttttaatagtaataagtatcaaatgtcaaattattgttaaaataattactaaaaataaaattaataaaaaatctttttatagtaagaa

SEQ ID NO: 1433 - DNA, 237 bp, Homo sapiens; identical to SEQ ID NO: 1431

SEQ ID NO: 1434 - DNA, 302 bp, Homo sapiens; identical to SEQ ID NO: 1432

SEQ ID NO: 1435 - DNA, 1798 bp, Homo sapiens
cctgctgaggacatgaggacccgtctttttgcagtgccaggcagggtggccaaagaggactggactctggacctggagccccgtggtccagttcacattcaccccacaagagtttcaggaggcctcccacggtgcctgtgctgggtggcggtggtggtgccaagaggaatggaatgtcctgggctccttcaggagctctctacccaggggcaaggagagcccagagagaagcgccctggtctcttgagcttcctgatctgctcctgtcccccgctctcctccactcccttgcctttccctaggttgtcccctccctgggcttttgtgtgttttgggagatgtcacctaaccaggacattgatattcaatcccatcccccttcctcccaccctgccccactttgatttaatcctttggctgtgggctgaggcctcccagggaagctgggtggggtgggtgttgagaccccctcagaccagcacagagacctgtccttgtgcagtctgcaccctgcactccctcccttgcctgtagatgttctggatgacagtagaggaaatggacaaggtcagtttgaatatcccagaacacagtgctctgtctcctcccaccagtccagttagcttcccttctggaccaatagacgaggggagaccccatggatcctctggctgggaagccactgaccaggtggccagggggcagggtgggaagaggggttaaggtgcagtgatgatggcctgttttggagtgtgtctgagactgggattgcatttggggtttcccgtgtgcttgggatgctagagggtcacctgcaggaggcctggggccggcgagaaatctcctgtgatgccctgtgaaatggcttgtctcctcccccatcagggcccaccgaaagctcaggggagcacagaagcccatggaagcccagggagatgtccctggggcagacactaaggcaggtgttgaagacaagctgcttgtcaagaagcatttcccggcaagagaggggcaagtctggggctccaactgggtacagcctgggtgcagttataagcccctttggcttacttggtagaagatggctacttggatgtacctcacttaaagatgttttgtaccacactaggtctctgggcccttgtgcttcctgtgggtggggtgagggccaaaggctatggtttcctgcctccaggagaatggagagaaagggcttccaggcccctccaagcctggggaaggacgtggcatccaagctgagccagagggaactgctgctgtcctcccttcatttctgtggaccttggaggctttggctttgtggcagggcctccccaggcagctctgggacctaggagtttgcttctgatagggtcagctttcccatttcccttcaatgcttgggaaccttctcccttagcttcacacttgccgtttcaagccctgctgggaccttgtggcttggctggaatccaggactgtattttcatggagaagaacctgcagattcttccatcctcagctggccatggcccacagctctgcatctgcatctgagcttctcaagactcctggagcatgaggggaatggggcggggccactgctctgtgctgacgggctccgtctcggagattcttgtcctgttttttttctgttgtttttttttggctggtgctggggacaagcctgtgcctgccaaagctcccaggccaagtttgggggctggtgtttggggttgggtttggggttcaggatgctgcagtctgtgcaataataaacccgcatctgctcacgggc

SEQ ID NO: 1436 - DNA, 1186 bp, Homo sapiens
gacgtgggtccttcccatctgtgtccttgttctcacgatccttgaggggcagctgaagggcttcagtttgagtgggggctgaaagaccatagagcttctacagtggagtttctaaagcaaacttccagaaacttctatgagtagatgacaatagaatcaagagcctgccctttgaggtggagtccccccagcctccaatgctagcccagccactttcttcgcttctctgagcctcagttttctcatctataaaatggggataattacagagcctacctcctggtagtgaggattacattagatgttgaggctgtagaaagcagtggagaaatggagacgagtgttgttatcacgctatggtgctgttagctctgctacaagccctcttgcgttttggtagaggatcccagggaccccaaagggatggaggtgattcagataccagttgtttagtcagaatatctcaatcagtgggggagcctgaggggatcgccacattccacagaggcttagagcagagggacttgcccaaggtcacgcacacagcaagttggtggcaggaaagcagttctcttgactttttaggaataagtactgcccatgaagttactctcacagccggtggttcccagcgagggggttggagaagaaggtccctcaaccaacagtaggctcgagttcaggcacaccctgtcctcaggagcctggctcccctacccaacccagccctatcactgatgggccatgtgctccctcactccctctttctgtgcctcagtttcctcttctgctgaggagactctaatccctgccccatggtcttcctcataggcaatgcagttgtgaggctcaaatgagatagattatggtgataaagaggttttaagctgggcatggtggctcacacctataattccagcacgttagaggaggctgaggcaggtggatcacttgaggtcaggagtttgagaccagcctggccaacatggcaaaaccccatctctactaaaaaagaaaatacaaaaattagccaagtgtggtggcgcgtacctgtaaacccagctagttgggagactgaggcaggagaagcacttgaaccctggaggcggaggttgcagtgagccaagatcaagccactgcactccagcctgggtgacagagcaagactccatctggaaaaaaaaaa

SEQ ID NO: 1437 - DNA, 950 bp, Homo sapiens
tggtgagcaggaaggcgaagtagatatggaaacagaaatgatactaatatcggtgattccttccttttttcctgtgataagtgctgtgcagacaacatatgagcagtgctgataaatgtaaatgtattgttcatagctcattaagaatcagtttcagaaagagatgtctgcttatttggctgcttgaagaatccctgtcaaacagtccttttcaggaagtacaagaggctgtctctatttgtgacctcaggaatggctgtgacagtgtcgtgaccagtccttttcctgtggcacagatctgaactttgtgtgcagaaaaatcttggcttcaagtgagccaagatgccccctgagcatcagcatcacaacttcatcctcctatcttgaagttcatgttatagtgactttaatgaaatcatagagcactgtttcttcgtgtaacaatgacgagggagagcaaaaaactttattgaaaaataaaaaggcaggtaatttagatgaaaatatgttacccatgaggttttgtttttgctttttgtttttgtttttgagaaacagaatctcgctctgtcgtccaggctggagtgcagcggcatgatcttggctcactgcaacctccgcctcccgggttcaagcgattctcctcagcttcccaagtagctggtactacaggcatgcgccaccacaaccagctaatttttgtatttttagtagagatggggtttcactatacgttggccaggctggtctcaaactcctgacctaaggtgatccttctgccttgggctcccaaagtgctgggattacaggcatgagccaccttgcctggccctacccatgagccttgactaaaacattcttctatctgtagaaaagcccaaaagaacttttccagattcaaaaaacttggcactttgtaatggtaatgtttacattaagtaaaaaaaaaa

SEQ ID NO: 1438 - DNA, 112 bp, Homo sapiens
aggctgagacaagagaatcgcttgcacctgggaggcggaggtttcagtgagctgagatcgcaccattgcactccagcctgggcaacaagagcgaaactccatctaaaaaaaa

SEQ ID NO: 1439 - DNA, 4469 bp, Homo sapiens
ggatattcagcatcctctcccagagcaaaaagcgactccacatagaagactactctgtttctcagacaacacttgaccaagtaagctttgagtgtcaaaacagatttacttctcagggtgtggattcctgccccgacactcccgcccataggtccaagagcagtttgtatcttgaattggtgcttgaattcctgatctactattcctagctatgctttttactaaacctctctgaacctgaaaagggagatgatgcctatgtactctataggattattgtgagaatttactgtaataataaccataaaaactaccatttagtgagcacctaccatgggccaggcattttacttggtgcctaatcctatttaaattagataaaaaagtaccaaataggtcctgacacttaagaagtactcagtaaatattttcttccctcttccctttaatcaagaccgtatgtgccaaagtaaatggatgactgagcagttggtgatgtaggggtggggggcgatatagaaagtcagtttttggccgggcgtggtggctcatgcctgtaatcccagcactttgggaggctgaggagcaggcagatcatgaggtcaggagatccagataatcctggccaacagggtgaaaccccgtctctactaaaaatacaaaaattagctgggcatggtggtgcgcacttgtagtcccagctacttgcgaggctgaggcaggagaattgctcgaacccaggaggtggaggttacagtgagccaaggtctcgccactgcactccagcctggggacagagcaagaccccatttcaaggggggaaaaaaagtctatttttaagttgttattgcttttttcaagtattcttccctccttcacacacagttttctagttaatccatttatgtaattctgtatgctcctacttgacctaatttcaacatctggaaaaatagaactagaataaagaatgagcaagttgagtggtatttataaaggtccatcttaatcttttaacaggtatttgtgaactttgccaaggaccaaagtgatgatgaccacttaaaagacctctcattacacaaaaaccagacagtagtggacgttgcagttctcacatcttttctacaggatgagaaagtgaaagaaagctatgtatgaagaatcctgttcatacggggtggctgaaagtaaagaggaactagactttcctttgcaccatgtgaagtgttgtggagaaaagagccagaagttgatgtgggaagaagtaaactggatactgtactgatactattcaatgcaatgcaattcaatgcaatgaaaacaaaattccattacaggggcagtgcctttgtagcctatgtcttgtatggctctcaagtgaaagacttgaatttagttttttacctatacctatgtgaaactctattatggaacccaatggacatatgggtttgaactcacacttttttttttttttttgttcctgtgtattctcattggggttgcaacaataattcatcaagtaatcatggccagcgattattgatcaaaatcaaaaggtaatgcacatcctcattcactaagccatgccatgcccaggagactggtttcccggtgacacatccattgctggcaatgagtgtgccagagttattagtgccaagtttttcagaaagtttgaagcaccatggtgtgtcatgctcacttttgtgaaagctgctctgctcagagtctatcaacattgaatatcagttgacagaatggtgccatgcgtggctaacatcctgctttgattccctctgataagctgttctggtggcagtaacatgcaacaaaaatgtgggtgtctccaggcacgggaaacttggttccattgttatattgtcctatgcttcgagccatgggtctacagggtcatccttatgagactcttaaatatacttagatcctggtaagaggcaaagaatcaacagccaaactgctggggctgcaagctgctgaagccagggcatgggattaaagagattgtgcgttcaaacctagggaagcctgtgcccatttgtcctgactgtctgctaacatggtacactgcatctcaagatgtttatctgacacaagtgtattatttctggctttttgaattaatctagaaaatgaaaagatggagttgtattttgacaaaaatgtttgtactttttaatgttatttggaattttaagttctatcagtgacttctgaatccttagaatggcctctttgtagaaccctgtggtatagaggagtatggccactgccccactattttattttcttatgtaagtttgcatatcagtcatgactagtgcctagaaagcaatgtgatggtcaggatctcatgacattatatttgagtttctttcagatcatttaggatactcttaatctcacttcatcaatcaaatattttttgagtgtatgctgtagctgaaagagtatgtacgtacgtataagactagagagatattaagtctcagtacacttcctgtgccatgttattcagctcactggtttacaaatataggttgtcttgtggttgtaggagcccactgtaacaatactgggcagcctttttttttttttttttaattgcaacaatgcaaaagccaagaaagtataagggtcacaagtctaaacaatgaattcttcaacagggaaaacagctagcttgaaaacttgctgaaaaacacaacttgtgtttatggcatttagtaccttcaaataattggctttgcagatattggataccccattaaatctgacagtctcaaatttttcatctcttcaatcactagtcaagaaaaatataaaaacaacaaatacttccatatggagcatttttcagagttttctaacccagtcttatttttctagtcagtaaacatttgtaaaaatactgtttcactaatacttactgttaactgtcttgagagaaaagaaaaatatgagagaactattgtttggggaagttcaagtgatctttcaatatcattactaacttcttccactttttccagaatttgaatattaacgctaaaggtgtaagacttcagatttcaaattaatctttctatattttttaaatttacagaatattatataacccactgctgaaaaagaaaaaaatgattgttttagaagttaaagtcaatattgattttaaatataagtaatgaaggcatatttccaataactagtgatatggcatcgttgcattttacagtatcttcaaaaatacagaatttatagaataatttctcctcatttaatatttttcaaaatcaaagttatggtttcctcattttactaaaatcgtattctaattcttcattatagtaaatctatgagcaactccttacttcggttcctctgatttcaaggccatattttaaaaaatcaaaaggcactgtgaactattttgaagaaaacacaacattttaatacagattgaaaggacctcttctgaagctagaaacaatctatagttatacatcttcattaatactgtgttaccttttaaaatagtaattttttacattttcctgtgtaaacctaattgtggtagaaatttttaccaactctatactcaatcaagcaaaatttctgtatattccctgtggaatgtacctatgtgagtttcagaaattctcaaaatacgtgttcaaaaatttctgcttttgcatctttgggacacctcagaaaacttattaacaactgtgaatatgagaaatacagaagaaaataataagccctctatacataaatgcccagcacaattcattgttaaaaaacaaccaaacctcacactactgtatttcattatctgtactgaaagcaaatgctttgtgactattaaatgttgcacatcattcattcactgtatagtaatcattgactaaagccatttgtctgtgttttcttcttgtggttgtatatatcaggtaaaatattttccaaagagccatgtgtcatgtaatactgaaccactttgatattgagacattaatttgtacccttgttattatctactagtaataatgtaatactgtagaaatattgctctaattcttttcaaaattgttgcatcccccttagaatgtttctatttccataaggatttaggtatgctattatcccttcttataccctaagatgaagctgtttgtgtgctctttgttcatcattggccctcattccaagcactttacgctgtctgtaatgcgatctatttttgcactggaatatctgagaaattgaacaactagacaaaagtttcacacagatttctagttaaatcatttcataaaagaaaaaagaaaaaaaattttgtatgtcaataactttatatgaagtattaaaatgcatatttctatgttgtaatataatgagtcacaaaataaagctgtgacagttctgttggtctacagaaa

SEQ ID NO: 1440 - DNA, 209 bp, Homo sapiens
atctcggctcactgcaagctccgcctcccgggttcacgccattctcctgcctcagcctcctcagtagctgggactacaggcgcccgccaccacgcctggctaatttttttgtattttttagtagagacggggtttcaccgtgttagccgggatggtctcgatctcctgacctggtgatccgcctgcctcggcctcccaaagtgctgggt

SEQ ID NO: 1441 - DNA, 159 bp, Homo sapiens
atctcggctcactgcaagctctgcctcccgggttcacgccattctcctgcctcagcctcccgagtagctgggactacaggcacccgccaccacgcctggctaatttttgtatttttagtagacatggggtttcactgtgttagccaggatggtcttgat

SEQ ID NO: 1442 - DNA, 184 bp, Homo sapiens
aagctctgcctcctgggttcacgccattctcctgcctcagcctcccgagtagctgggactacaggcgcccgccaccacgcctggctaattttttgtatttttagtagagacagagtttcaccatgttagccaggatggtctcaatctcctgaccttgtgatccgcccaccttggcctcccaaag

SEQ ID NO: 1443 - DNA, 232 bp, Homo sapiens
cagtggcgcgatctcggctcactgcaagctccgcctcccgggttcacgccattctcctgcctcagcctcctgagtagctgggactacaggcacccgccaccacgcctggctaattttttgtatttttagtagagacggggtttcgccgtgttagccaggatggtctcaatctcctgacctcgtgatccgcccgcctcggcctcctaaagtgttgggattgcaggcatgagcc

SEQ ID NO: 1444 - DNA, 104 bp, Homo sapiens
cggctcactgcaagctctgcctcccgggttcacgccattctcctgcctcagcctcccgagtagctgggactacaggcgcccgccaccatgcctggctaattttt

SEQ ID NO: 1445 - DNA, 117 bp, Homo sapiens
tcagctcactgcaagctccgcctcctaggttcacgccattctcctgcctcagcctcctgagtagctgggactacaggtgcctgccaccacgcctggctaattttttgtattttttag

SEQ ID NO: 1446 - DNA, 161 bp, Homo sapiens
ctcactgcaagctccgcctcccgggttcacgccattctcctgcctcagcctcccgagtagctgggactacaggcgcccgccaccacgcctttctaaattttgtatttttagtagagacgggatttcaccatgttagccaggatggtctcgatctcctgacc

SEQ ID NO: 1447 - DNA, 6833 bp, Homo sapiens
tgagactgcagttcctgcgacgcccctgcagcagcagcagcgtggtcagagcgagcttctgagcggtggtgggttccatgtgatggtggagtaggagacaggtctccgcggtcagtggcgggggcgtggaccccaccgggaaccctccctgctccttccctgcctctccctgttttcgtgcccgcacttcttcgtgggcatctgggcccgagtcctccgcttgggggcggttgtgcggtcctggctactgcagcgtccgcaccccggccgggaaggctatgccaatgtccgacccgcgtccagcgtataggagcgccctggcccacagctggcggtaaaacgcgggacctgggtccctcggagccccaggggcctctgagctggagtctaggattatttttgatgcctcagcacctttaaaaagagacctcgctagagcagggggcatctgtattttcagttctttgaggagtctccagctatttagctgttttccatggtgtgtatcctaattttcatttccacctacagtgtatgagtttccctttctccaaaaccacacccgcattcctactatttttggtttggggtttgttttgtttttgtttttgttttgagacggagtcttgctctgtcttacaggctggagtgcagtggcgccatctcggccgactgcaaccgctgcctggttttaagcaagtctcctgtctcagcctccagagtagctgggactacaggcgccgccaccatgcccagctcatttttgtatttttagtagagatggggtttcacgatattggtcaggctggtctcaaactcctgacctcaggtgacccacctgcctcagcctcgcaaagtgcagagattacaggcatgagacaccgttcccagcccctcctatttttttaaaaaaatcaaggaatattcgataagtgtgagattatctgtgtgtggttttgaattacagttttctaatgaatagttgattttgaggaccttatctcttatttgttgttcgattttatggctgtgcagaattgtctgttcaggttctttgcaaaatattagattggatgcttttgctactttgtagtgttttttgtgtacatattagatgacaactcctcgtgaattacaagattgcctgaaatttttgcctaatctataggatgcttttttaattggaaagtagttttctttgatgtgcagaaacttttcatgttgatgtagtcaacatgatatttatttttgcgtttcatgcatgtaattttcgtcacccatataagaaaataatatgtcagtgacaaagcatttaattgtcaatgaggtttttcttccagggtgtttattttcctctttgcaaaggtgagcagagattcaagtgacccaaaatatatgctcatcctgtgttttagttaaaaacattttgtagtttatggtcttttgttttgccttcaatttgggggagtgggtgttcattttcatacatcgtgtaaaataaggtcctatttctcgcttctgcatctggatatcatttttgtcaaaggtattcattctctgccttccacattgcagtgttctttatcaaagtcagttgattgtgtccatatttgtgttgatcatgtttttgtcctccctgtttttgtccatagtttatgcaagtatcatatatcagctgtataactacaacttggcagtgtaatttgatattaaggattgtgggtcttcactttgtatttctcaggattcctttagatattcattgcttttgtggttccctgtgatttttagcaatacgtatttatttctgttaactttttttcacaacataaaggtccataattaggggtacattttcatacatacagattgggtaatgatcaaatcagggtacttaggatctctatttgctcatccaggttttttttttttttgtggggagaacattcaaaattctcccttcttactctagaaaaatatgatattgttaactccagtcaccaggctgaggaggagaacctcagatttgttcctttaatgttaagataactttgtttccataatcaatccttccccattccccctctatctcccaaactctggtaaccaatattgtgctttttacttcattaagataaacatcttaagatttcacatgagtggtatcatgcagtgtttttctaggcctagctccttacatttaacataatgttttccaggttcatctgcgttgctctaaatgggactgtttcattattttgatggctgaagaatatttcctagtgtatgtatatgagagtttcttgatctctttatctgtggatgaacaggtaggttgaatttacacccagtaatgggactgctagatggaatggtatttctttttttcctattctttgcaagacctctaactgttttttatagtgttaatactaatttatgtttgcacaaacagttcccctttctggcaattcataccaggaattgtctttttaaatattttgatctttttgtaatgttcattctattggagtgagataagatctgagtgtggttttgatctgcatttttctcatgagtagtaatgttaaccacgtttttgtagacattcggtcagtttcctgtcttctttggaaaaatatctaatccggttatttgcccagtttttgtctggcaattgttctgttgttttgttatttttttgccagctggtagtatgactggcttgtaccttttcaaaaataatcccttatcccaaacttgtaatttttagtgtgcctttttattttgtttattgtttcctttgttggtcacaaatgcttcagcttgacgtggtcccacatgtgcataatttcttggtggctgtgctgttggttactaatcaagaaaaaacaaaatcactaccaaagcagtcccttgtcaataatttttttcccttgtatttttgtttactttttgtgaaccctgagcatacatccaagttgctctaaatatacgcacacccgaggttgtctttataggagctttatggttgcaagttttgtgtataatctttaatcattttgagttgattattgtgtatctagtaccataagggtcctgtattacccttttgcatatggatatctagtttcggaagtcttccctgttgtgtcattttggtggtgttttgaaaaatgtgttcattccatataaatttttgtttattattgagcacattcattttgctcactggtctgtgtttctctgtctatgccagtaacatatgggtttgttaactacggattttcatttaattagaactcagggaatgtgatgcatcccgtatggtttgtatttctcagaatagctttggaaattcagggtgtttcacatttccacataaattttggcattgtttctttatacttcctaaaacactatttgtcatatactaaatgtatacaattagaaggtacaaggaaggttttcatacatgtatatgttgaataatgataaaatcaggttatttagcatctcttcatctcatatagttattatttttggtaacaacattcagaatctttccttccagctactttgaaatatatgatacatttgtgttaaggctagtcacgctgctgtggaatagaaggccagaattgatcactatcatctgagagtaactttgtacccatcactgattccttccgagactgcctccacttccccagcagcctctggtaagccctattgaactttctacttctagaagataaagcttttttcagtctacatgtgtgagatcacgtggcatgggactttctctaccaggcttattctttggaccttgttcttcagatttcttcatgtggctgcagatggcaggatttcccaaaggtttatggctgcaacatattccgtggtgtatctgtacagcagtttcctcattcctgcagctgtgtttgaacaggtaggttggttctctaccttggccacagttaagagtgctttagtacccatgggaaggcagatagctctcttcaacctagggacttcaactgctttaaatgtggaaccagtggtggggctgttagctgacatggtagttgtactgtgaatttttttcagaaacctctagctgtttttcatagtgtgtatactaatttacatccccaccaatagcgtttaagaggttacctttctgtaagtctacactggatgtcaccttcaaaaattcgtgttttgtttttggtagtactcattctgagtggaatgagacagaatcttagtgtggttttcatggacatttttttgtgaggtttagtgatgttgagaaagttatttgagaaatccccacattgctttccatggtgtccgaactagtttgcatttccaccaacagcagaccagcatccctcctcctctgccttgctggtgttcattcttgtggactgtgtcataattgtcattcatcagaatgtgtgaaatactatctcatgggccttttgctttgcatttctctgatgattcctgaggtaaagaaatgtcttgtctgttggttgctgtaaaccttcttttgagatgcatgttttcatgccccttaccctttcttcattgagtttttgtttttctgatttatttgcttaatgtatttgaagtagattctggatattagacttcatcagatgcagatgtgggaacattttctcccattgtgtaggctgtctgtttactgtgttggtaatttcttctgctgtgcagcagctcttttgtatattaggccccacttgtcaataattgttttagttgcaattgcttttggggacttaggcacagccatgctctgccaaatcctctgtcaagaagggtatttccaagttctcttgcaggcttttcatagtttgaggtcttgcgtttacatcttcattcatcttgagttaatttctgtacagggtgagacacaggggcccactgtttttcttctgcaactggctagcagtttatcctggcaccatctattgagaggagggagtcctttctccaaagcttattttcgtggatttttttgaagatcagatggtgttaggggtgtgggtttacatctgggtcctctaatttgttccactgctctgtgtgaaatggggtccctagcttttcaatgaaattaaaaatcaggaagtgtgacacaaccaatgtagtttggacttctcaggattgctttagaaattcagggtgttttgtggtctgcatgaattttagcattgtgtatttacgtattttttaaaaggttggccatatagtaaaggtatacaatggggggagttagagtggggcattttggttaatgcagacatagaggaatgttaaaatcaggatatttagagtctctgttatcacaaagttgttaatttctttatggtgaaaacatttggaatcttcttttccagattttgtgaaaaagatgtgatgttttgttaacctctggtcactgtgctgtggaacagagaggaacaattcattcctctcatctaagtgtaattttggacctatttctgatccctgcccatacccctgcttccctccaatctctggaaaccactgttatgctctctagatctattgcaataaagccttttattttgggttctacatgagtgagatgtggcaatgtttttctttctctacctggtttaggtcatttaccatgcggtcctccaggttcaacagtatggctccaaatgatgaaatttcattctgattttctggctgaagactattctgtttgtgtatgtccaccacagttactttatcccttcatctgtggatgggcaggtaagtttattccttatcttggcgattgtgaatagtgctgcagtccacataggatggctgacatctcttgcataaactgatttctttggcactgaaagtatacttagtagtagaattgttagatgaagtggtagttgtaggtttaatttttggaggaacctcccactggtttctgtagtatgtatactaattaacattctcttttttttttttttttggatggagtctcgctctgttgcccaggctggagtgcagtggcatgatctcagctcactgcaagctctgcttcctgggttcatgccattctcctgcctcagcctcctgagtagctgggattacaggcacccgccaccacgcctggctaattttttgtatttttagtagagacggggtttcaccatgttagccaggatggtctcaatctcctgacctcgtgatctgccggcctcggcctcccaaagtgctgggattacaggcgtgagccaccgtgcccggctgtatactaattaacattcttaccaaacgagttcttctctggaaatttccaccagcatttgtgtcttttttaatatattttatcactttgataacatccatttgaattatagtgagatgatatatgtgttgttttgatttatatcttatggtttgtgatgttattcaagtttttaaaactcgttttcaatgttatgtcttttttgtagaaatgtctatttaggttttgtttggttattagtttctcttttgtgtttttgctagtaagtagtgttagttgcttagacattttgaagacagccttttatcagatatatgtttgttgaaacatttcttgtagaatgaaacatatatggaaatgttctgtgcaataaaaacagcagtggtaacacagatgtaggctctgagtgtctcactggagactgaagtccacagatatgcaacaaagcctttgtctccctgatgtttttgcctcctgctggtcatgtgctttcacacatcaagagaggacatttaacatttga

SEQ ID NO: 1448 - DNA, 489 bp, Homo sapiens
ctcgcctggccttaagcagcttttattcgtccatgtcatagaatcaatggaataaatatgtcattatcagttaccaagaagacaaaagatctagatttagttctagctctatctactcagctttgcaacctttaggaaattagtcacaaattgagacatcagtgattttaccggtaaaatgagaaagaaaaactgtatgattctctaatgcccattccagtttgcaaattaaatgattctatagctaaatttctaccacaaatctagaaagtatacatatttttacaaggtccagcagcacatataggcaaagataaaaattatcctagtgagataaagtatacaactatgttcattttaggacatgaaaaatctaaaaaaatatgagcttatattattttatttggctttaaccaataaaaactttagagttaataaattctaaagttggtatatgcaacaagccatttacttatcaatatataattt

SEQ ID NO: 1449 - DNA, 284 bp, Homo sapiens
ttttttgaaaagatcaacaaaattgatagaccgctagcaagactcataaagaagaaaagagagaagaatcaaatagacgcaataaaaaatgataaaggggatatcaccactgatcccacagaaatacaagctaccatcagagaatactacaaacacctctacacaagtacactagaaaatctagaaggaaatggataaattcctggacacatacaccctcccaagactaaaccaggaagaagctgaatctctgaatagaccaataacaggctctgaaattgagg

SEQ ID NO: 1450 - DNA, 186 bp, Homo sapiens
ttctgttcctgtgttagcttgctgaggatgatggcttccagcttcatccctgtccctgcagaggacttgatctcatacctttttatggctgtgtaatattccatgatgtacatgtagtacattttctttttccagtctatcattgatgggcatatgggttggttccaagtctttaccattgtgaat

SEQ ID NO: 1451 - DNA, 8125 bp, Homo sapiens
tgggagtgggcatctggctctccgtgtcccaaggcaactttgccaccttctcccccagcttcccttcgttgtctgcagccaacctggtcattgccataggcaccattgtcatggtgacgggcttcctcggctgcctgggggccatcaaggaaaacaagtgcctcctcctcagcgtaagttctgtccaaatccccagcccctccaactcctgatctccttgcacttggacccctgggacaggcaagacctggaatattagacacctgggtgtccaacctgagcccagggaaactgcttctagaacgttctaggcttgaccacacccctcctcctcatggttggttatgcctacccctggttgtccctcccactccctgattagtcagctcctttatgtccctgtcctagctatctgggtttcctcaggaggagctggcttctcccagacctgggaagccccacctaggcgccgcctgtccctgccttccacaccctccttgtcctcagccctgcccattaccacctacccatgcctggccctttcctttccagtttttcatcgtcctgttggtcatcctcctagcagagctgatcttactcatcctcttctttgtctacatggacaaggtaagccttaccagatgggagggggcatatggaatgtcactgcccttagagttgggccaagcaggccagggtcccttccctggccagaggaagagtgctggcaagcagcacctgtgcagaaaggaacatggaaccaagggttgggaaagctaccaaggaaagagcagatggaaggttttgatgggggcagcacggggcaggcaaatttggaggatgggagagttgactttgtatagttccaggaagtggaatcctctgcatgaccagagatggcagtgggctgcctctggcgctagtgagctccctctcactggaaggaattaagctacttggagaagggattcagacctcatcaggtggttgggctgggtgatttgagagcaaaccatgaaaaacaaggaggaactctctgggcgacgctggctgagcaggactgaggcacagggaagctctgtttcctgcactagagcccttgaggacgggcgctgctcctgggttcaggaggatggtgggtgaccccctgtaacctcgccaggctgggcagttcgcagtcaagagcgaggttggccgggatttcagtctcttggggcgtggcaggccctttggtaccatgcactccagaactgtgtaaggagcagttcttgaaatagctgcctgagccacactgaaagttagagacatcgttaggatgagaaagaataatcttttagttttgcactcgtgaaaaggaagaaagaacaattttgagagatttctctgtgccagccctgttcttggcccttttatgagaattgtttcccttaattctaacaacagcgccatgagtagatgctgctgttcaacatcgggtagaacagcggtgagggaggtgaaggtcacatgacctgtcttcctccctctagttcccagggtgtgttttgagaggggcagtctgtggggaagctgtgtagtggggggcgggggtggcagagtggcctgtgtgtgtggctggtcctgggatgggggagtggaggcacgtggtgtgtttttttgcctctgggtgttacagccctggccctgagtttagctctgctgggaggcggtgggtgcaccagggcctgctgtattctgaaactgggagtgtgtgcctaaccccgcacctctgttgggccagcagaggcccccaccccagtgggcagggccttccagaccagctgccttccctgccttcctcactcctcatctgtcacccaccatcctgggtgacctgaggtgggctggagagacgagctgcgtcctggttccaaccgtctcactgtgtccctccgcctggcaggtgaacgagaacgccaagaaggacctgaaggaaggcctgctgctgtaccacaccgagaacaacgtggggctgaagaacgcctggaacatcatccaggctgaggtgcgggctgggccgccctggtggggccaggcagggaggaggggtggcggccggtacttctagctgccttccccggtgacctggccgggcacctgtgctttctggattttagccgggagtggagtggtacccacgggggcatttgcctgaactgctgagtcagatgtgatacagcaaggtacagccagggagggatgaggatacaggaggggcaggcctgagagagctgtggctgagctttgggatgaatgactgaatttattttagcaacagatttgcctccatgatggggcttggcttaggtgaggaggccctggctctaggaggagaacaagtccatagtcccagatgctcccattttaagccctggggaggggccggcagggggttgggtggcagtcagcttgggacggtttacagaaagagcagaggtgctggtgggcaagcacagggctgagccaaggggcccagcccgaggggtgggctgcattgccctctcccgctctggtctccaggaaggagtgctcactcacttctccagtgggcccggctgaagcccaaagaagggacaagaagcaagccctttgtctcctcccttaactgcagggtggccacttttgcggggactggggttggcctgggcaggggaaggccctggggaggaaggggcgggccatggcatgtctgactgccccttccattcctgctggccagatgcgatgctgtggtgtcactgactacacagactggtacccagtgctgggggagaacacggttcccgaccgctgctgcatggagaactcccagggctgcgggcgcaacgccaccacgcctttgtggagaacggtgaggctggggatggaccgcttgggtccaagagcccgtgtgtggatgccccggcacggggagccctataggggaggctgggcccgggacactaagaggttggctgaatgtggcggtggggggctcacaaaaataaagccaaaagacaggtggaaaatggggggtggggctggacccacagttgggagagtcagagggcgaggggttgaatggggtctgaggctctgcagctggccttgcgggtggggcggaggctgcgccaagggatggggacagggctgaggccagggagggctgggaggtaagagtgaggacgaggtggaaggagagagtgagctgggggctgggctgcagggagcgcatgcttgggctgggaccctaacctcgtgggcctcgctccccagggctgctatgaaaaggtgaagatgtggttcgatgacaataagcacgtgctgggcacggtggggatgtgcatcctcatcatgcaggtaagaggggcgtccccagcagcctcacccaccctgctggcctcagccgcagagggaaggaagcacagagaagtgaaagcagtgttggtacacggcggagggtctggaattcatcacagctattcaagcttagcagctgtgcctgccaccgtttccgcagagctctgatatgagagcacgtgtctactcagcactgagagtggtgctcagggctgcctgtggccaggcccaggctgggatattgaagctggagtcaacccccgtgggttcccccagttctgcccaaaccttgagctcagagagccatgcaagacacacacggtgtcccccggtcaccatctttacagcctgtgcacatggcacactctctgtggtgaccgtgagaccacaccgggcttccttctgcctcctgcactcctctgggtccccggctcctttgaggattcaggagggaaggggcacaaacgagtagtgacgtggtcctgagcacacatcactggaaagacagccctgctgctgccaagacatcgcaccatgtgttccacaagcagacaagagaggcttgacaggagtcctttatttttctttttttaagagacagggtctcactttgttgctcaggctggagtgcggtggcgccgtcatagctcgctgcagccacaaactcctgggctcaagccatcgtcccacttcagcctctcaagtagctgggactacaggcatatacaccaccatacctgaatgatttacaacttttttccaaaaacagatggagtctccctctattgcccaggccgatctcaagccatcctcccaccttggcctcctaaagtgccaccgtgcccggctggcctgagtcctgaatgatccctgccacctcccactccccaccttggctcctgtgagcccccacgtagagccaggtcctccgtgcattccgtgcctgcagcgcccctctgagtaggcacacgtatgcatcctgcagaggttcgatggcttctggtctaacagccccacgaggctgagccagagttcacctgtgtgtgtctccagggtgacctctgttcacggttttcttcatgtcttcattccataagcattttcctggcacaccagtggccatccccgcttgctctaggtgccctgtgacatcccaagcctctcggggctgaggtcaggtccaggctgctgcagctcctgcctcaggcccctccccgtgtctttcagatcctgggcatggccttctccatgaccctcttccagcacatccaccggactggtaagaagtacgacgcatgagcgggctggccgggagtgcccaccccgccctgctgccctgtggagggaagaggattgagctttgtgtcgcctgcctgcgctctccagatatgacccctgcacccaccccccacagcctgccctaccccacctaccctgcctcagcctcggacttctcagtgggtggagtgccagggaggaggaggcacacggagacctggggctcggggcccctggattcctgcatctgcatatgcgtatttgccaaagacgacagggtgggctggggtgcgctctggaggaacccccggcactgatgggcttctgcccctgcccttcctcacactgacactttgtccccacatggggtggggagcagagtgcccgccccgtggagataccgccccagcgggggctgcgacatccatggccaccatggggcacctggcggggcgggggtctgccggcctctgggcaaggcccctggagcatctcgcccaggctttttataccttacaatgtaacttttttattttattttactctatgattattcaggaatattatctctcagataagtttagggttagatttctgatttgtaactttttactgtgttgatttctttaatggtttgactttttttccctgagggtgagggatgggtgggaagagaggacatctgtccagtctcaatcaggacagaccaccgtgcgacacccaggaggctctcggatggggcgcgcctgcgccctcagaacgtgtgggaaggagggggcgtggacaggacacgggaccttgccaggcctggtgtctgaggacaggagcctgggagaggcgggtggagcgtgaagcaggctggaggtgcccctgcacgggaggtggcgtttgctaaccaatcgagctggaaatgccagggcaggggggccccacggtgctgtggcagagctagaggggtccttagacttttcactgatgagcagttgttggttttttctttctcccttcctcccgctctctgctggcacgcgaggcttccccttccaccccatgtgggtattcccacaacaggttctgcacaccccagttatttcacagacattcctgctagaaactgtcagacaaatacctctctagttcggatgctgctcactttcccccttgcttctggaaggggaagcagtccttaggttttgctgtgctgggacagtggcaggggacccacaggggtgaggacccacggtcctccccgccagccttgctcagctgtgggttgccctgctgggaaggagggaatcacgtccacctgggtcccaagatcttcgcctccttccctggggccacggacatcagcagtgggttgggtggcgattatatcatctgtgatcccaaggagaagaaatacagaaaacccaagagaggtcagactggctcttgttaccggagccacgggaagaaagcagccggagtcacgcacgtgcagagctgggcatgggagagaaacgggctggggagtgaggccaggagtgggattcagctgcagcagggcgccccctccaaactgcagctggtctggcttactgttttgccgttcaaaaaggtcgcgaatccgtgggactgagcacggggacctcacccgctagccagcgtctgctgcacttgatcaggtggggccttggtgggcggctgcctttcctatacagtttgtcttgtcaccctggtttcccactggggccaggtctcttctccagcctccacctgcctgtctgatccaagagctgagacacggccacccagcaccagtcactcctctgttcaccttaagtaacacacaaaccgggaacaggaggacagaaccgttggcattatcaggattcgtgttttgtgggggtgggagtggagagtagggtggtcttgtgagttgtgcagggtgaagaccgcttccctgagacaggggcagtggtgctgatggaatgtgggggaggcccacatttgagcaaagctgccctgcccttgtcccctggcctggcttcctggtaaggagtttcagccgcctccgcaggaacccccaaagtgcagattccggagcagacacatccgggcggagagactcagcagacaagtgctgcagttgcacggtgggacccggggcctcgtgcgttttttgctgtgggtggggtgggtgggttggtttatgcctatcaatgcaatttttaatttttgttaatatcaacagcaaaagcctagtgcattgggagatgtgcaacctccctgaaaatcttttctgtttctggagtacttcaggggtggcctctggccccagagcctttgccacagtgctcccaccagcccccacctcatccgtctgtttgcagagcctcatctacaggtccccacgctgccttctttactcactctgcgcttggccgttttgttatttggcttagtctacattgggcggaagtctgtgtgcacagagtgggtgttccttcgagccccttccactcagagggccacacccagcgatgccagtgaaggtggcacagcctctcttcagtttctcctgactgtgatctcactggggtagaattcccctgagagaattccctcactcacggctccctttgccagagtcagttcaatcaggtctgatgtgagcaatttacacacttgtctcagaaagtccctcagggtttgtagaggactgcaggggggcatccgctgcagactcagcctttctctgcagccatcctgcagtgggggtgagcgggcacaggctgagaactgctcttgggtggtggaagcaggtgtcacggtgcaagtctccccctgcacccctcccccagcttgagccgtgtcacccccctctccctccagcatgggcctgtgtctcaggctctctggaaggtggccctgccccggaccctcttgcaggtgtcctggtttgacttggaactagatggccatctttccaggctttggtggcccaagagcagtctgggtggatggaagtggctgtcccctcctctccagcccctgcccacccactggtggaggtgctaactagcagggacgtggcataggatgggagctgggcgtgaggtgcttggggtccattctttgtccctcagcttctcagagtccggccagcccttgtgttcccgtgccccacactttcctcctccccactgcagtgagtcaatagtccagggtggggcctggcctccctgccctgattggggactcaggaggtgaggcctggggggcttcctgccccctccttgcccacctgcctgcccccgggcagcacgggagggagagcagggtgagcacgcttgttggtttcagatgcactttctgcttgcattgccgtatctgtgcgttccttcatcctggtcctggctttatggaacaccatgtttttagcatgtttttaaataaaaacggataaagtgtcaaaagcacagca

SEQ ID NO: 1452 - DNA, 1111 bp, Homo sapiens
gtcagcaaaggttcatgctattcgatagatgctttcactaaatgatgagtgggaaatgtaactttgtcatcttgcagagcctacaatgcaaacattttttccgccccatgtacagtttcatttacatagtgttgtcaaggaataagtgatttgtttcacttaagtgatttttccaggtaattgaagcttacctctttgtgcacacattattctttgcttaaactttctttgatgaaaacatggcacatggttctttcctttttttttgcttggtacatataaatgtggctacatcttttcttgacttggggttatcatgataaagattgctttttgttctgtgccgtaatcctgttattgacagctgaattgtgtgggattgagagcctgtatgtgaatagtcacagatccatattcttttagagttaccattattactaataatatagctcctctgagtcattagcaaatcccaggcaggatgctaagaattcatatacattataatcttggctaaaccatccaccccactccaagaaatgatcattattattcctcctactttacaggtaaaaattgaagtttaagggataagtagtaagtggtagagttgagatttgcatccatgtctctctaactgcaagatgcctgttgccagttatacttcttctatttctcctctctgcccctctttgggtatttctgtctgtccggttgctttaaaagcctttgcccaggtaagggcccgagattaggtctgtgcctattttgtggaaattattggtatgtttttcgttaagtggagttctgaaggcatttttgctgatttctgggttcccagacatctgcacggttgccgtttctagaagtctaacctgtgaattcatcactgtgtatgctaaggctttgggagggattataggattttctgcattatgattaagcagcataatcaagaaacttgcagtcagaggaaagcgtggcaattctgtaatgcagaagttggcagaccttttctgtggagggccagatactaaacgtcttagttcattttgtgttgctataaaggtatacctgaggctgggtaatttattaaaaaaaaaaaaagagg

SEQ ID NO: 1453 - DNA, 315 bp, Homo sapiens
gccaaccctacatctttgccctggccatggtcgtgcataccagcttcacttcccgctgccagcacctgcattggtttgtctgaggactttctctgactgtggaagtggtgggctggaaatgcaggggaattagcatccactccctccagtgatgaacagggtttggcctatggatactccagctcccttgctcatccagtgaaactaaggggtgtatattgtacaccttttcccagagtttccaccatggtgagtatcaccatggtgataggtgacttaataggctagtacttttttttttttttggtggcctta

SEQ ID NO: 1454 - DNA, 4150 bp, Homo sapiens
tggtaattgtgacactgtggagctgtccttctttgatgtctcagtcactcagtaagccatgtaatttaaattgaccctctgagtgaccaagttgctctgaaaattttccaagtacatgttacaatgagaatgagagaaggaggagggaaaggcggggacatcatgaaggtagaagaggaggaggtttagaatcaagcacaaagagggctcaaaattacgtggaaattggggctggtcagtcagttagccaggggactaatgactttatgcctgctactctgcagtctaccatcattagggacatcttaaacatagaaaggaaggaacacccaatttcacttcaggcacccagccacaggaactttcctaaggttgagcctttgcgttgaaagtgagaccgttatctaaggattcctctccacaccctgattcctgaggagtgttcaaagactcagaaacaatgacaggcctgctgctgagctttgctgtctgcagtaaatgaacgttcagcccttgccctcctgacctgcttgtctttgtttctacagaacagtgctcggcatggcagggattccagggctcctcttccttctcttctttctgctctgtgctgttgggcaagtgagcccttacagtgccccctggaaacccacttggcctgcataccgcctccctgtcgtcttgccccagtctaccctcaatttagccaagccagactttggagccgaagccaaattagaagtatcttcttcatgtggaccccagtgtcataagggaactccactgcccacttacgaagaggccaagcaatatctgtcttatgaaacgctctatgccaatggcagccgcacagagacgcaggtgggcatctacatcctcagcagtagtggagatggggcccaacaccgagactcagggtcttcaggaaagtctcgaaggaagcggcagatttatggctatgacagcaggttcagcatttttgggaaggacttcctgctcaactaccctttctcaacatcagtgaagttatccacgggctgcaccggcaccctggtggcagagaagcatgtcctcacagctgcccactgcatacacgatggaaaaacctatgtgaaaggaacccagaagcttcgagtgggcttcctaaagcccaagtttaaagatggtggtcgaggggccaacgactccacttcagccatgcccgagcagatgaaatttcagtggatccgggtgaaacgcacccatgtgcccaagggttggatcaagggcaatgccaatgacatcggcatggattatgattatgccctcctggaactcaaaaagccccacaagagaaaatttatgaagattggggtgagccctcctgctaagcagctgccagggggcagaattcacttctctggttatgacaatgaccgaccaggcaatttggtgtatcgcttctgtgacgtcaaagacgagacctatgacttgctctaccagcaatgcgatgcccagccaggggccagcgggtctggggtctatgtgaggatgtggaagagacagcagcagaagtgggagcgaaaaattattggcattttttcaggcaccagtgggtggacatgaatggttccccacaggatttcaacgtggctgtcagaatcactcctctcaaatatgcccagatttgctattggattaaaggaaactacctggattgtagggaggggtgacacagtgttccctcctggcagcaattaagggtcttcatgttcttattttaggagaggccaaattgttttttgtcattggcgtgcacacgtgtgtgtgtgtgtgtgtgtgtgtgtaaggtgtcttataatcttatacctatttcttacaagtgcaagatgactggctttactatttgaaaagtggtgtgtgtatcatatcatatatcatttaagcagtttgaaggcatacttttgcatagaaataaaaaaaatactgatttggggcaatgaggaatatttgacaattaagttaatcttcacgtttttgcaaactttgatttttatttcatctgaacttgtttcaaagatttatattaaatatttggcatacaagagatatgaattcttatatgtgtgcatgtgtgttttcttctgagattcatcttggtggtgggtttttttgtttttttaattcagtgcctgatctttaatgcttccataaggcagtgttcccatttaggaactttgacagcatttgttaggcagaatattttggatttggaggcatttgcatggtagtctttgaacagtaaaatgatgtgttgactatactgatacacatattaaactataccttatagtaaaccagtatcccaagctgcttttagttccaaaaatagtttcttttccaaaggttgttgctctactttgtaggaagtctttgcatatggccctcccaactttaaagtcataccagagtggccaagagtgtttatcccaacccttccatttaacaggatttcactcacatttctggaactagctatttttcagaagacaataatcagggcttaattagaacaggctgtatttcctcccagcaaacagttgtggccacactaaaaacaatcatagcattttacccctggattatagcacatctcatgttttatcatttggatggagtaatttaaaatgaattaaattccagagaacaatggaagcattgcctggcagatgtcacaacagaataaccacttgtttggagcctggcacagtcctccagcctgatcaaaaattattctgcatagttttcagtgtgctttctgggagctatgtacttcttcaatttggaaacttttctctctcatttatagtgaaaatacttggaagttactttaagaaaaccagtgtggcctttttccctctagctttaaaagggccgcttttgctggaatgctctaggttatagataaacaattaggtataatagcaaaaatgaaaattggaagaatgcaaaatggatcagaatcatgccttccaataaaggcctttacacatgttttatcaatatgattatcaaatcacagcatatacagaaaagacttggacttattgtatgtttttattttatggctctcggcctaagcacttctttctaaatgtatcggagaaaaaatcaaatggactacaagcacgtgtttgctgtgcttgcaccccaggtaaacctgcattgtagcaatttgtaaggatattcagatggagcactgtcacttagacattctctgggggattttctgcttgtctttcttgagctttttggaaggataattctgataaggcactcaagaaacgtacaaccacagtgctttcttcaaatcatatgagaaatactatgcatagcaaggagatgcagagccgccaggaaaattctgagttccagcacaattttctttggaatctaacaggaatctagcctgaggaagaagggaggtctccatttctatgtctggtatttgggggttttgtttgtttttgctttagcttggtgaaaaaaagttcactgaacaccaagaccagaatggatttttttaaaaaaatagatgttccttttgtgaagcaccttgattccttgattttgattttttgcaaagttagacaatggcacaaagtcaaaatgaaatcaatgtttagttcacaagtagatgtaatttactaaagaatgatacacccatatgctatatacagcttaactcacagaactgtaaaagaaaattataaaataattcaacatgtccatctttttagtgataataaaagaaagcatggtattaaactatcatagaagtagacagaaaaagaaaaaaggactcatggcattattaatataattagtgctttacatgtgttagttatacatattagaagcatatttgcctagtaaggctagtagaaccacatttcccaaagtgtgctccttaaacactcatgccttatgattttctaccaaaagtaaaaagggttgtattaagtcagaggaagatgcctctccattttccctctctttatcagaggttcacatgcctgtctgcacattaaaagctctgggaagacctgttgtaaagggacaagttgaggttgtaaaatctgcatttaaataaacatctttgatcacaaaa

SEQ ID NO: 1455 - DNA, 1238 bp, Homo sapiens
ttaagtggtctgcccttccactgaaagtgtagctttttgacagtctcagccatataaacaggatctcagtttcatccttccatccatccattagaggcacaaggtctcatctcttttccttttgggcattaaaaccaaagttcatacattattgagacaggccgactctgctaaggcagcctgtttggcctttaagttttattgcttattttttgagtatgtatttatttttttgattattattattttttttttgagctttaagccttcaagtttcctttttattcttgacccctagacatttcctttgcttgtggactcgggtatttgtttttaggtaatattttttttccctatgacacagccctcaggagatcctgagaacatgtgccctcatttttaggtaattttaattaggaagggttttaggttgtctgatctgccttgttgctagaaacagaaattctcctattgattgatttttcaaaccacttcttagtggcctctacaactactccagtcaggtcaagaatggctctcacattgccaagtcagtgggtatttttagtcttcatcttagatgacctttatgcacatttgtctttgtctaggaacttctgttggaaacatcttctattttaatgttattttaaatttttttgcttttgtaacattatgcttagcatgtgtgtccaactctttgacaatttctttttagttttctggtggcttccctttatccaaatttagtattgaaattcctcgagccgctgcttttctcactccataattctggccagaatttggtacttaaaatattttgtctaaaatattacaatagctacttaagtcatctccctgactccactctgttgtctttcagggcgtcgtccacactgtagccaaagtgatcttataaaaacataattctaatcatggcactcttctgcttaaaaatgttttaatggctttccgttaggttaaaatttaaaagtcctttgtagcctgtgagactctacatgagttgactccctagcttcatctttgagcatcttatttctttacttattataccatcagttagagttgattgttatataatccacagaagtgaattctgtctgatttaagcaaaaaaaaaaaaaaaaaaaaaaagagggagaatttattaggtgtgtatagttacagttaatttagggaattaaaagacagaaataggccgggcatggtggctcatg

SEQ ID NO: 1456 - DNA, 1112 bp, Homo sapiens
ttaagtggtctgcccttccactgaaagtgtagctttttgacagtctcagccatataaacaggatctcagtttcatccttccatccatccattagaggcacaaggtctcatctcttttccttttgggcattaaaaccaaagttcatacattattgagacaggccgactctgctaaggcagcctgtttggcctttaagttttattgcttattttttgagtatgtatttatttttttgattattattattttttttttgagctttaagccttcaagtttcctttttattcttgacccctagacatttcctttgcttgtggactcgggtatttgtttttaggtaatattttttttccctatgacacagccctcaggagatcctgagaacatgtgccctcatttttaggtaattttaattaggaagggttttaggttgtctgatctgccttgttgctagaaacagaaattctcctattgattgatttttcaaaccacttcttagtggcctctacaactactccagtcaggtcaagaatggctctcacattgccaagtcagtgggtatttttagtcttcatcttagatgacctttatgcacatttgtctttgtctaggaacttctgttggaaacatcttctattttaatgttattttaaatttttttgcttttgtaacattatgcttagcatgtgtgtccaactctttgacaatttctttttagttttctggtggcttccctttatccaaatttagtattgaaattcctcgagccgctgcttttctcactccataattctggccagaatttggtacttaaaatattttgtctaaaatattacaatagctacttaagtcatctccctgactccactctgttgtctttcagggcgtcgtccacactgtagccaaagtgatcttataaaaacataattctaatcatggcactcttctgcttaaaaatgttttaatggctttccgttaggttaaaatttaaaagtcctttgtagcctgtgagactctacatgagttgactccctagcttcatctttgagcatcttatttctttacttattataccatcagttagagttgattgttatataatccacagaagt

SEQ ID NO: 1457 - DNA, 294 bp, Homo sapiens
atcagcactgaatacttatgtatttcttacaaacaaggacattctcctacaatatcacagtatagctattaagaacagaaaattaacactgctatattactaccatctagttttcaaatgccattcaagttttggcagttgtcaatgtttttggagatcacagcgtagttgttttggattttatttttcattactaaattcagattatgttttggggggcaggaattttatagaaattatctttgcagtgcatattatcaataacacataatcaggctttcccaatgtaaaggt

SEQ ID NO: 1458 - DNA, 140 bp, Homo sapiens
gtctctactaaaaatacaaaaattagccaggcatggtggaaggcgcctgtaatcccaactactcaggaggccgaggcaggagaatcgcttgaacctgggaggtggtggttgcagtgagctgagattgtgccattgcactc

SEQ ID NO: 1459 - DNA, 294 bp, Homo sapiens; identical to SEQ ID NO: 1457

SEQ ID NO: 1460 - DNA, 4710 bp, Homo sapiens
taaagaaggtctggatgttatggagagagctgatcctttattccttttaattggacttcctactattcctgtcatgctgatattaggcaagatgattcgctgggaggactatgtgcttagactgtggcgcaaatactcgaataaactacaaattttaaatagtatatttccaggtaaggcactgaactgtggttgtaaagtgcataccaaattgatcttgaagaacaataacatgcttttttagccatgtttgaaggtagtctaactcttctgatttattagcactaacgcactgcatttttttcctctagggataggttgtcctgttcctcgaattccagctgaggccaatcctttagcagatcatgtctctgctactcgaatcttgtgtggagcccttgtctttcctactattgctacaatagttggtaaattgatgttcagtagtgttaactctaatttacaaaggacaatcttggtaagacggctttaacattacttatattaccttgcaaaagagaatgaagtgtatttgtttttaaaaggtggggaactgtataaatattcggtctgtggctcctatgcattaagcctctatttgagcctcactatcattcaatagcttgagtggaaataaaaagaggagaaaccactgcagcagttctggccttttggaactatgttgtaggtgctttctctcctggcatatgcatgaatcatcacacctgtccctcttgccagtgggattacagtactttacgatcagaccacctggttcaaatcccatcacagaaattgtcttgctgtgaaatctaaatcaaatgtctggactttttgttcctgtagtatggtgatggtaataatcaggattattgtgaggattgtataagtactagcacatagtaagcactcatgttgtttgctattattgttactcccacttctcccctctggtggcatgtaacctgcacggaccttggaggactgaacaaagggggcaaacgtgggaataaaagacaaagacaagagagtatatttggaagaaggggtcagggggcaccttgcctctagtggacaagggccctgagctttacacagccctctgtatttattaggcaaaagagatagtgagaagcaggggtgattgtcgggtaattgtcagtccatttggcagtttggttcacagcaggcttgcgagactgcatcatttgaacagtaggcgctagatttcccagtagataagttcaaggagccctgcaccagggagtgatggcccccagcaaaccctttggtggcaggctcagtgtgagtttactcacatcctgcattcatgataaacagtttgctgtttggtcatatagcctccagtggaatgctgagttggtcacgatccctttggcctttcttgctcccaacagtggcagtctgcacatagtgccctagcattcttctttgtatatcagagtatatgtagaactacatggaagaaagactagtcagaaaggataatggagaaggcatctgtgtcccctgttacctgtagtaacagcgtatagtctgtctctctccctatctcatctcctagtagaaaaagaaaactgtttcatttgcagtcatctgaattagtttagcatcaaagcctacgtcttttgtgatctaaataaaattatttttattactctgtttctctaaatctgcattataaaaagctaattttcctttttattttagggtggaattgcgtttgttgccataaaaggagcatttaaagtttacttcaaacagcagcaatatttacgacaggcacaccgcaaaattctgaattatccagaacaagaagaagcataaaactgacttctggttgttctgcagttctctcatccttatgaatctgttgtgttgttttgattccatcattaatgcacttgtggagacttgtgataagctgctgctcctatattttttaagaaatataataaagcacttagggcaggggaaatcatctcggtaatcatggaacctaaggatgtgatttgttttcattgtttgtatgtactacttttatggcagtcatatgaaccattatcttagcatggtaaacctgggttttgttcatattttctccagacagaaatgcaaagatcaaactgtgcaaatattaaaaaaatgcacatgctgttttattcaaatgcctcttttgtacatgttcatgtttagtgttttctcagaatcagcaactcaaggtactatgaggatttttctcactgacataatttgattacatactaaataagaggatatgttaatatgaggaaatgtaaattaaattagttataaataaataaccaaaaatgtatgtaaacattcaaatgattatctgaacaaatgagattttgtggtgttttctttaacccatgtgatgtcctccaaaatgtgtagggtaaaaattcacagggcttccagatcactttttcaatattaaattttatttacataatgttgacatctcatacttcatgaagtaattttgactcatgcagtcgtgtgtgtgtgtgtgtgtgtgtgtgtgtgtgtgtgtgtatttgtgtgtttcagtgtttcatcaggtccttccatctctgggagttttttcaacccatatttctagaaattacagctgccagtttatagtagtttgagcagaggatgatttgcaaaaataaaaataaagttattttactctcctcttgcattgattcagttattgagatattcgttgatcacctcctatttcccaggcactgtgcagagtgctgtaggacatagtggtgaacaagacagacttggtccaagctcttacagagttgacagtctagtttcagcacatagaaaaccagcagtgaataaaccaaggtgaggccttgagctctttgtttttatattaatgaggagaaaagtatgaaaacaagaagtcttaagtaaatattgaggtcattgtttttggcttaagtttattatagaaaatcaacactaatgtttttagattttaattgtcctattgatgaggctagcaccttaatcactgtttagttttgtattcatttttaaaagcaattattgaagccattttcaatagattggccattttaatgttcagcaacctgaatggttatttttgttaattaaaattaaatttttaagagatattttcaaaaccctatttattttcttgttcacagtaatgcatgtcaataataaatgtttccccttactgataagcggccactttaggagtgtagcaaatatagattgagctatgttagtttgcaataatatatgttaactttagtaattaaagactggtttctatagtatgaatgtcttaattttgagttatatgatgtttatttgaatgactgttgaacattcaaatttgtattatttggagatgaagatttgactaacagtgagccttattaagaacactactacagttctgaaggggaaatataacatctatggttatatattttaaaaacttagattataggctgtaattataaaatatattggcttttgttttcaatgtgaaagatacattaaatggacacatatcttgcaaaattttgttgtatagaacagtttttaggcagcctttactaaagttatgcaaacacacagttccccatttactacattaatgcccttgacagggagtagctgcttggttttataggtattagggctcatgaaggccggggaacaactctaatccttttggggcaggagggagggtttttttagggttgcggggagggaactgcaagtgcctgaggaccagagtggcctctagccccgaattgaacacttttaaacctaaagagccttattattattagctcgagaaataccacatgccagtcttcccaggaaggtgacctgcctgaccatgaagcaacaaaagagcataggcagacttaaagttggatagacctgggttcaaatcatagttcagctttcaataactgtatgtatgattttggctaaaggatttgactttctctcaactgcagttttcttaatctttgaaatgcaaataatgtttatctcagaagactatttctaggattaactgagagattaaaggaacagcagcacttaggctcaaaatcgcccctacaaagcagtagttgtttcttaattgctaagtaatctgtttgcactctaggaaaagtaaatggagaggtaaaagaaaggcattggggacaaatgaaagagatgatgtagatttttcggatgggtgggtatattttattttccagtttattttcatatttctttactgtgttatttctggaaactttaatgttttaaacctcttttataaaattcaatgacgactactagaattcttttcaaaagttaacttatctccaaagtggctgaaaatattgtttaccattacatgattatgaaatgactgtgaagaatataaaattaaacttagtgacttaattagtcactgccttgctaactttgctgtaatttttttaaacgtcttgtttttaatatagcaaactatctcaatactggctggattaggttaaataaagaatttttatgttctctaggtgtactttgttaaatctcaaaacattctgtacatacataattttttttaatcacagttatcgagatactagtttttgtaagtaaaagtaatctgaattt

SEQ ID NO: 1461 - DNA, 5204 bp, Homo sapiens
  misc_feature (151)..(151): n equals a,t,g, or c
ttttttatggctgcatagtattccatggtgtatatgtgccacattttctttatccagtctatcatttatgagcatttgggttgtttccaagtctttgctattgtaaatagtgctgcaataaacatacatgtgcatgcatctttatagtagnaatgatttataatcttttgggtatatacccagtaatgggattgctgggtcaaatggtatttctggttctagatccttgaggagtcaccacactgtcttccacaatggttgaactaatttagactcccaccaccagtgtaaaagtgttcctatttttccacatcctcaccagcatctgttgtttccagactttttaatgattgtcattctaactgatgtaaaatggtatctgattgtgatctcagtggtatctcattttgatttacatttctctaatgaccagtgatgatgagctttttttcatttgcttgttggccacataaatgtcatcttctgagaagtgtctgttcatatccttcacccactttttgatggggttgtttttttttcttctatatttgtttaagttccttgtagattctggatattagacctttgtcagatggatagattgcgaaaattttctcccattctgtagggtgcctgtttactctgatgacagtttcttttgctgcgcagaagctcttagtttaattagatgccatttgtcaattttggcttttgttgccgttgcttttggtgttttagtcatgaagtctttgctcatgcctgtgtcctgaaatgtattgtctagattttcttctagggtttttatggttttaggttttagatttaagtctttaatccaccttgagttaatttttatataaggtgtaaataaggggcccagtttcagttttctgtgtatggctatccagttttcccaacaccatttattaaatagggattcctttctgcattgctagtttttgtcagatttgttgaagatcagatggttgcagaagtattatttctgaggcttctgttccattggtctacacatctgttttggtaccagtaccatgctgttttgggtacggtagtcttgtagtacagtttgaagtcaggtagcatgatgcctccagctttgttctttttgcttaggattgccttggctatacaggctcttttttggttccatatgaaatttaaagtagtttttccaattctgtgaagaaagtcaatggtagcttgatgggaatagcattcaatctataaattactttgggcagtatggccatttttatgatactgatttttcccatccttgaacttggaatctttttccatttgtttgtgtcctctcttatttccttgagtagtggtttgtagttctccttgaagaactcctacatgtcccttgtaagttgtattcctaggtattgtattttctttgtagcagttgtgaatgggagttcactcttgagttggctctctgtttatctattattggtgtataggaatgcttatgatttttgcacattggttttgtatcctgagactttgctgaagtcgtttatcagcttaaggagttttggggctgagacattggggttttctaaatatacaattatgccatctgcaaacagagacaatttgacttgctgtcttcctatttgaataccctttattttttttctcttacctgattgctctggccagaacttccaatactgtgttgaataggagtggtgagagagaatatctttgtcttctgccagttttcaaaaggaatgcttccagttttgcttattcaatataatgttggctgtgggtttgtcataaatagctcttattattttgagatatgttccatcaatacctagtttattgagtttttagcctaaagggtgttgaattttattgaaggccttttccgcatgtattgagataatcatgtggtttttgtcattggtcctcttatgtgatggattatatttattgatttgcctgtgttgaccagccttgcatcccaaggatgaagctgacttgatcatggtgtataagctttttgatgtgctactggaatcggtttgcctgtattttattgagcatttttgcaccaatgttcatcagcgatattggcctgaaattttctttatttcttttttttttttttgtacctctgccaggttttggtatcaggatgatgctggtgtcataaaatgagttaaggaggagtccctctttttccattgtttggaatagtttcaaaaggaatggaaccagctcctctttgtacctctggtagaatttggctgtgaatccgtctggtcctgggctttttttggttggtaggctattaagtattgcctcaatttcagaacttgttattggtctattcagggattcgaattcttcctggtgctgtcttgggagggtgtacatgtccaggaacttatccatttcttctagattttctagtttatttgtgtaggggtgtttatagtattctctgatggtagtttttatttctgtgggatcagtggtgatatctcctttatcattttttattgtgtctatttcattcttctctcatttcttctttattagtctggctagtggtctatctattttgttaatatttttgaaaaaccagctgctggatgtgttgatttttggaagggttttccatgtctctatttctttcagttcatctctgatcttagttatttcttgtattcttgtaccttttgaatttgtttgctcttgcttctctagttctttcaattgtgatgtaagggtgttgattttagatctttcccactttctcctgtgggcatttagtgctataaatttctctattaacactgctttagctgtgtcccagagattctggaacattgtctttttgtcctcgttggtttcaaagaacttctttatttctgccttaatttcgttatttactaagtagtcattcaggggcaggttgttcagtttccatgtagttgtgcggttttgagtgaatttcttaatcttgagttctaatttgattgcactgtggtctgagagagtgtttgttataatttctgttcttttgcatttgctgaggagtgttttacttccaattatgtggtctattttagaataagtgctatgtatattctgagaagaatatatattctgttgatgtggggtggagagttctgtaggtgtctattaggtccacttggtccagtgctgagcacaagtcctgaatgtccttgttaattttctgtctccattgacccatctaatgttgacagtggagtgcaaaagtctccaactattattgtgtgggagtctaaatctctttgtaggtgtctaagaacttgttttataaatgtgggtgctcctgtattagattcatatatatttacgatacttagctcttcatgttgcactgatccctttaccactacgtaatgccctactttgtcttttttttatctttgtttgtttaaagtctgttttatcagaggataggattgcaacccctgctttttttcactttccatttgcttgttaaatcttcctccacctctttattttgagcctatatgtttctttccatgtgagatgggtcttctgaatacagcacactgatgggtcttgactctttatccaatttgtcagtctgtgtcttttaactggggcatttaacccatttacatttaaagttaatattgttatctgtgaatttgatcctgtcatcatggtgctagctggttattttgcacattagttgatacagtttcttggtagtgtctttggtctttatattttggtgtgtctttgcagtggcttgtactggttcttcctttccacatttagtgcttccttcaggagctcttgtaaggcaggcctggtggtgacaaaatcccccagcatttgcttgtgtgtaaaggattttacttcttcttcacttatgaagcttagtttagctggatatgaaattctgggttgaaaactcttttctttaagaatgttgaatattggcccccatcctcttctggcttgtagggttcctgcagagagatctgctgttagtctgttgggcttccctttgtgggtaacctgacctttttctctggctgcccttaatattttttccttcatttcaatgttggagaatttgacagttatgtgtcttggggttgctcttctcaaggagtatgttagtagttctctgtatttcctgagtttgaatattggcctgtcttgctaggttggggaagttctcctggataatatcctaaaatgtgttttccaacttgattccattctccccatcactttcagggaccccagtcagtcataggtttggtctttttctatagtcccatatttcttggaggctttgttccttttcattcttttttctctaaccttgtcttcacaccttatttcagtaagttgaccttcagtctctgatatcctttcttccacttgattgatttggctattgatacttgcttatatttcatgaagttctcgtgctgtgtttttcagctctattaggtcatttatgttcttctctaaactggttattctagttattagttcatgtggccttttttttttttaaaggtttttagcttccttgcattgggttagaacaagcttttttagctcaagagtttgttattaccccccttctgaagcttacttccatcaattcctcaaactcattctgtgtccatttttgtgcccttactagagaggatctgggataatttggaggagaagaggcattctggttttttaaattttcagcatttttgcacggttttttcctcatcttagtggatttatctacctttgtactttgaggctgatgacctgtggatgagattctgtgtgggggtcctttttgtcgatgttgatgttattgctttctgtttgttaggtattctaacaggcaggcccctctgctgcaggtctgctgcagtttgctggaggtccactgcagaccctatttgcctgggtatcaccagcagaggctgcagaacagcaaagattgctgcctgctccttcctctggaagtttcgtcccagaggggcatggacctgatgccagctggagctctcctgtataggtgtctgtcaactcctgttgggaggtctctcccaatcaggaggcatggaggtcagggacccacttgaggagcagtctgtctcttagcagagctcgag

SEQ ID NO: 1462 - DNA, 3049 bp, Homo sapiens
gtaaataccctatgaatattgaatgaatgagtttgtggattttaaatatttaaccaaagatgtaatattttttgttgtgtatggtttttcatgagcctgtttgtaaaattaattctttgttttccagttgatgaaacttctgagcaggaacaaaaacataaagaaaccaacaatagcaatgctcagaaccccagcgaagaagagggtgaagggcaagatgaggacattttacctctaacccttgaagagaaggaaaacaaagaatacctaaaatctctatttgaaatcttgattctgatgggaaagcaaaacatacctctggatggacatgaggctgatgaaatcccagaaggtctctttactccagataactttcaggcactgctggagtgtcggataaattctggtgaagaggttctgagaaagcggtttgagacaacagcagttaacacgttgttttgttcaaaaacacagcagaggcagatgctagagatctgtgagagctgtattcgagaagaaactctcagggaagtgagagactcacacttcttttccattatcactgacgatgtagtggacatagcaggggaagagcacctacctgtgttggtgaggtttgttgatgaatctcataacctaagagaggaatttataggcttcctgccttatgaagccgatgcagaaattttggctgtgaaatttcacactatgataactgagaagtggggattaaatatggagtattgtcgtggccaggcttacattgtctctagtggattttcttccaaaatgaaagttgttgcttctagacttttagagaaatatccccaagctatctacacactctgctcttcctgtgccttaaatatgtggttggcaaaatcagtacctgttatgggagtatctgttgcattaggaacaattgaggaagtttgttcttttttccatcgatcaccacaactgcttttagaacttgacaacgtaatttctgttctttttcagaacagtaaagaaaggggtaaagaactgaaggaaatctgccattctcagtggacaggcaggcatgatgcttttgaaattttagtggaactcctgcaagcacttgttttatgtttagatggtataaatagtgacacaaatattagatggaataactatatagctggccgagcatttgtactctgcagtgcagtgtcagattttgatttcattgttactattgttgttcttaaaaatgtcctatcttttacaagagcctttgggaaaaacctccaggggcaaacctctgatgtcttctttgcggccggtagcttgactgcagtactgcattcactcaacgaagtgatggaaaatattgaagtttatcatgaattttggtttgaggaagccacaaatttggcaaccaaacttgatattcaaatgaaactccctgggaaattccgcagagctcaccagggtaacttggaatctcagctaacctctgagagttactataaagaaaccctaagtgtcccaacagtggagcacattattcaggaacttaaagatatattctcagaacagcacctcaaagctcttaaatgcttatctctggtaccctcagtcatgggacaactcaaattcaatacgtcggaggaacaccatgctgacatgtatagaagtgacttacccaatcctgacacgctgtcagctgagcttcattgttggagaatcaaatggaaacacagggggaaagatatagagcttccgtccaccatctatgaagccctccacctgcctgacatcaagttttttcctaatgtgtatgcattgctgaaggtcctgtgtattcttcctgtgatgaaggttgagaatgagcggtatgaaaatggacgaaagcgtcttaaagcatatttgaggaacactttgacagaccaaaggtcaagtaacttggctttgcttaacataaattttgatataaaacacgacctggatttaatggtggacacatatattaaactctatacaagtaagtcagagcttcctacagataattccgaaactgtggaaaatacctaagagacttttaaaaataggctttcttatatttgatatttggaagaaaaagccgtaaggtgtatgtagaccacttaatcactaaatatctttgcctataggactccattgaatacattagccattgataatctacctgtttaaatggcccctgtttgaactctcaagctttgaagacctacctgttcttccagaagagaacgttgaaagtgccatgtttccttttgcgtgatctctgttgatggcactctggaattgtttcagttaagtcattttagacatagcatttattatcactgtggatctctacttgttgggtgttatgaattctttgaagaaatatattttgaagaggtgtgggaggaaggaatacattttataaaatgttgtagtgaagcccacaattgacctttgactaataggagttttaagtatgttaaaaatctatactggacagttacaagaaattaccggagaaaagcttgtgagctcaccaaacaaggatttcagtgtagattttgtctttcttgaacttaaagaaacaaatgacaaagtttgaatggaaaagcctgctgttgttccacatctcgttgctgtttacattcctttgtggagcctacatcttcctaagctttttagcaggtatatgttgaacacttctgtttcatggttgagacagaatcagaggccatggatactgacaactgatttgtctgttttttttctctgtctttttccatgactcttatatactgcctcatcttgatttataagcaaaacctggaaaacctacaaaataagtgttgtggtttatctagaaaaatatggaaaatattgctgttatttttggtgaagaaaatccattttgtatagtttatttcaatctaaataaaatgtgaattttgtttaaagcttaggcacattattttttgtggggtccaaacattcttgtgtaaaattctcttaaacatttgataaacagcttcacaattca

SEQ ID NO: 1463 - DNA, 1153 bp, Homo sapiens
ctgtgatgaaggttgagaatgagcggtatgaaaatggacgaaagcgtcttaaagcatatttgaggaacactttgacagaccaaaggtcaagtaacttggctttgcttaacataaattttgatataaaacacgacctggatttaatggtggacacatatattaaactctatacaagtaagtcagagcttcctacagataattccgaaactgtggaaaatgcctaagagacttttaaaaacaggctttcttatatttgatatttggaagtaaaagccgtaaggtgtatgtaggccacttaatcactaaatatctttgcctataggactccattgaatacattagccattgataatctacctgtttaaatggcccctgtttgaactctcaagctttgaagacctacctgttcttccagaagagaacgttgaaagttccatgtttccttttgcgtgatctctgttgacggcactctggaattgtttcagttaagtcattttagacatagcatttattatcactgtggatctctacttgttgggtgttatgaattctttgaaaaaatatattttgaagaggtgtgggaggaaggaatacattttataaaatgttatagttaagcccacaattgacctttgactaataggagttttaagtatgttaaaaatctatactggacagttgcaagaaattaccagagaaaagcttgtgagctcaccaaacaaggatttcagtgtagattttgtctttctcaaacttaaagaaacaaatgacaaagtttgaatggaaaagcctgctgttgttccacatctcattgctgtttacattcctttgtggagcctacatcttcctaagctttttagcaggtatatgttgaacacttctgtttcatggttgagacagaatcagaggccatggatactgacaactgatttgtctggtttttttttctgtcttttttccatgactcttatctactgcctcatcttgatttataagcaaaacctggaaaacctacaaaataagtgttgtggtttatctagaaaaatatggaaaatattgctgttatttttggtgaagaaaatcaattttgtatagtttatttcaatctaaataaaaagtgagttttgtttaaagctaaaaaaaaaaaaaaaga

SEQ ID NO: 1464 - DNA, 3048 bp, Homo sapiens
gtaaataccctatgaatattgaatgaatgagtttgtggattttaaatatttaaccaaagatgtaatattttttgttgtgtatggtttttcatgagcctgtttgtaaaattaattctttgttttccagttgatgaaacttctgagcaggaacaaaaacataaagaaaccaacaatagcaatgctcagaaccccagcgaagaagagggtgaagggcaagatgaggacattttacctctaacccttgaagagaaggaaaacaaagaatacctaaaatctctatttgaaatcttgattctgatgggaaagcaaaacatacctctggatggacatgaggctgatgaaatcccagaaggtctctttactccagataactttcaggcactgctggagtgtcggataaattctggtgaagaggttctgagaaagcggtttgagacaacagcagttaacacgttgttttgttcaaaaacacagcagaggcagatgctagagatctgtgagagctgtattcgagaagaaactctcagggaagtgagagactcacacttcttttccattatcactgacgatgtagtggacatagcaggggaagagcacctacctgtgttggtgaggtttgttgatgaatctcataacctaagagaggaatttataggcttcctgccttatgaagccgatgcagaaattttggctgtgaaatttcacactatgataactgagaagtggggattaaatatggagtattgtcgtggccaggcttacattgtctctagtggattttcttccaaaatgaaagttgttgcttctagacttttagagaaatatccccaagctatctacacactctgctcttcctgtgccttaaatatgtggttggcaaaatcagtacctgttatgggagtatctgttgcattaggaacaattgaggaagtttgttcttttttccatcgatcaccacaactgcttttagaacttgacaacgtaatttctgttctttttcagaacagtaaagaaaggggtaaagaactgaaggaaatctgccattctcagtggacaggcaggcatgatgcttttgaaattttagtggaactcctgcaagcacttgttttatgtttagatggtataaatagtgacacaaatattagatggaataactatatagctggccgagcatttgtactctgcagtgcagtgtcagattttgatttcattgttactattgttgttcttaaaaatgtcctatcttttacaagagcctttgggaaaaacctccaggggcaaacctctgatgtcttctttgcggccggtagcttgactgcagtactgcattcactcaacgaagtgatggaaaatattgaagtttatcatgaattttggtttgaggaagccacaaatttggcaaccaaacttgatattcaaatgaaactccctgggaaattccgcagagctcaccagggtaacttggaatctcagctaacctctgagagttactataaagaaaccctaagtgtcccaacagtggagcacattattcaggaacttaaagatatattctcagaacagcacctcaaagctcttaaatgcttatctctggtaccctcagtcatgggacaactcaaattcaatacgtcggaggaacaccatgctgacatgtatagaagtgacttacccaatcctgacacgctgtcagctgagcttcattgttggagaatcaaatggaaacacagggggaaagatatagagcttccgtccaccatctatgaagccctccacctgcctgacatcaagttttttcctaatgtgtatgcattgctgaaggtcctgtgtattcttcctgtgatgaaggttgagaatgagcggtatgaaaatggacgaaagcgtcttaaagcatatttgaggaacactttgacagaccaaaggtcaagtaacttggctttgcttaacataaattttgatataaaacacgacctggatttaatggtggacacatatattaaactctatacaagtaagtcagagcttcctacagataattccgaaactgtggaaaatacctaagagacttttaaaaataggctttcttatatttgatatttggaagaaaaagccgtaaggtgtatgtagaccacttaatcactaaatatctttgcctataggactccattgaatacattagccattgataatctacctgtttaaatggcccctgtttgaactctcaagctttgaagacctacctgttcttccagaagagaacgttgaaagtgccatgtttccttttgcgtgatctctgttgatggcactctggaattgtttcagttaagtcattttagacatagcatttattatcactgtggatctctacttgttgggtgttatgaattctttgaagaaatatattttgaagaggtgtgggaggaaggaatacattttataaaatgttgtagtgaagcccacaattgacctttgactaataggagttttaagtatgttaaaaatctatactggacagttacaagaaattaccggagaaaagcttgtgagctcaccaaacaaggatttcagtgtagattttgtctttcttgaacttaaagaaacaaatgacaaagtttgaatggaaaagcctgctgttgttccacatctcgttgctgtttacattcctttgtggagcctacatcttcctaagctttttagcaggtatatgttgaacacttctgtttcatggttgagacagaatcagaggccatggatactgacaactgatttgtctgttttttttctctgtctttttccatgactcttatatactgcctcatcttgatttataagcaaaacctggaaaacctacaaaataagtgttgtggtttatctagaaaaatatggaaaatattgctgttatttttggtgaagaaaatcaattttgtatagtttatttcaatctaaataaaatgtgaattttgtttaaagcttaggcacattattttttgtggggtcaaaacattcttgtgtaaattctcttaaacatttgataaacagcttcacaattca

SEQ ID NO: 1465 - DNA, 3043 bp, Homo sapiens
gtaaataccctatgaatattgaatgaatgagtttgtggattttaaatatttaaccaaagatgtaatattttttgttgtgtatggtttttcatgagcctgtttgtaaaattaattctttgttttccagttgatgaaacttctgagcaggaacaaaaacataaagaaaccaacaatagcaatgctcagaaccccagcgaagaagagggtgaagggcaagatgaggacattttacctctaacccttgaagagaaggaaaacaaagaatacctaaaatctctatttgaaatcttgattctgatgggaaagcaaaacatacctctggatggacatgaggctgatgaaatcccagaaggtctctttactccagataactttcaggcactgctggagtgtcggataaattctggtgaagaggttctgagaaagcggtttgagacaacagcagttaacacgttgttttgttcaaaaacacagcagaggcagatgctagagatctgtgagagctgtattcgagaagaaactctcagggaagtgagagactcacacttcttttccattatcactgacgatgtagtggacatagcaggggaagagcacctacctgtgttggtgaggtttgttgatgaatctcataacctaagagaggaatttataggcttcctgccttatgaagccgatgcagaaattttggctgtgaaatttcacactatgataactgagaagtggggattaaatatggagtattgtcgtggccaggcttacattgtctctagtggattttcttccaaaatgaaagttgttgcttctagacttttagagaaatatccccaagctatctacacactctgctcttcctgtgccttaaatatgtggttggcaaaatcagtacctgttatgggagtatctgttgcattaggaacaattgaggaagtttgttcttttttccatcgatcaccacaactgcttttagaacttgacaacgtaatttctgttctttttcagaacagtaaagaaaggggtaaagaactgaaggaaatctgccattctcagtggacaggcaggcatgatgcttttgaaattttagtggaactcctgcaagcacttgttttatgtttagatggtataaatagtgacacaaatattagatggaataactatatagctggccgagcatttgtactctgcagtgcagtgtcagattttgatttcattgttactattgttgttcttaaaaatgtcctatcttttacaagagcctttgggaaaaacctccaggggcaaacctctgatgtcttctttgcggccggtagcttgactgcagtactgcattcactcaacgaagtgatggaaaatattgaagtttatcatgaattttggtttgaggaagccacaaatttggcaaccaaacttgatattcaaatgaaactccctgggaaattccgcagagctcaccagggtaacttggaatctcagctaacctctgagagttactataaagaaaccctaagtgtcccaacagtggagcacattattcaggaacttaaagatatattctcagaacagcacctcaaagctcttaaatgcttatctctggtaccctcagtcatgggacaactcaaattcaatacgtcggaggaacaccatgctgacatgtatagaagtgacttacccaatcctgacacgctgtcagctgagcttcattgttggagaatcaaatggaaacacagggggaaagatatagagcttccgtccaccatctatgaagccctccacctgcctgacatcaagttttttcctaatgtgtatgcattgctgaaggtcctgtgtattcttcctgtgatgaaggttgagaatgagcggtatgaaaatggacgaaagcgtcttaaagcatatttgaggaacactttgacagaccaaaggtcaagtaacttggctttgcttaacataaattttgatataaaacacgacctggatttaatggtggacacatatattaaactctatacaagtaagtcagagcttcctacagataattccgaaactgtggaaaatacctaagagacttttaaaaataggctttcttatatttgatatttggaagaaaaagccgtaaggtgtatgtagaccacttaatcactaaatatctttgcctataggactccattgaatacattagccattgataatctacctgtttaaatggcccctgtttgaactctcaagctttgaagacctacctgttcttccagaagagaacgttgaaagtgccatgtttccttttgcgtgatctctgttgatggcactctggaattgtttcagttaagtcattttagacatagcatttattatcactgtggatctctacttgttgggtgttatgaattctttgaagaaatatattttgaagaggtgtgggaggaaggaatacattttataaaatgttgtagtgaagcccacaattgacctttgactaataggagttttaagtatgttaaaaatctatactggacagttacaagaaattaccggagaaaagcttgtgagctcaccaaacaaggatttcagtgtagattttgtctttcttgaacttaaagaaacaaatgacaaagtttgaatggaaaagcctgctgttgttccacatctcgttgctgtttacattcctttgtggagcctacatcttcctaagctttttagcaggtatatgttgaacacttctgtttcatggttgagacagaatcagaggccatggatactgacaactgatttgtctgttttttttctctgtctttttccatgactcttatatactgcctcatcttgatttataagcaaaacctggaaaacctacaaaataagtgttgtggtttatctagaaaaatatggaaaatattgctgttatttttggtgaagaaaatcaattttgtatagtttatttcaatctaaataaatgtgaattttgtttaaagcttaggcacattattttttgtggggtcaaaaccattcttgtgtaaattctcttaaacatttgataaacagcttcaca

SEQ ID NO: 1466 - DNA, 38771 bp, Homo sapiens; identical to SEQ ID NO: 1148
  misc_feature (7892)..(9416): n equals a,t,g, or c

SEQ ID NO: 1467 - DNA, 779 bp, Homo sapiens
agccttcatccaggtgagaatgtgctgcagctggtttctttgggaggcctgtgggttaaagtaagcgatagtctatatgccgtgtggccatctacgaataagggctgggattgctggtggctctggtgcagcacagtcactgctttttccatacttggagagcctatgggagtgcgattttgatagggcttgaattgcaggaagagcccatggctcccaaggtggggcttgcatttctatcaagtagctgttaataatggggcagttgctgggcaactgtgtgctcagcagctgggcttttccctcagcccctctactaacctgctgtgaggcaagacaagggcaggacactaacgttcctgtctcctgattctttttctttaccattccttaagagaaggaaagcagagacggtccagtcctgtgatttctcagtgcttgttctaatcatatgtgctgattccctgttgaatgaagatgaaggccgggtgcggtggctcaggcctgtaagcccagcactttgggaggccaaggtgggtggatcacctgaggtttggagtttgagaccagcctggccaacatggtgaaaccccatctctactaaaaatacaaaaattagctgggcatggtaagtgggcgcctgtaatcccagctacttgagaggctgaggcaggagaattgcttgaacccaggaggcagaggctgcagtgagccgagatcgcgccatcgcactccagcctgggcgacaacactgtctcaaaaaaaaaaaaaaaaaaaaa

SEQ ID NO: 1468 - DNA, 5775 bp, Homo sapiens; identical to SEQ ID NO: 1152

SEQ ID NO: 1469 - DNA, 738 bp, Homo sapiens; identical to SEQ ID NO: 1153

SEQ ID NO: 1470 - DNA, 587 bp, Homo sapiens
attggatcctacagctaagattatttggaagcatgtcctgtgccctttctctgagagttaccccgttatctttgtgtgtctcactgtctctcatcaggcttaaaaaaaataccaaagcttttctcaccccaaaagactgtctcctgacctgccacctcacacagttgtctcttcccttcattgccaaactttcaggatgagcatactctagccttctcgaagtgtggcttctgtcccccttcccccaggtgccaaagccaggagtcagccttccctaggttcacctacttccctgcagcatctaacagactatccctccttcctgccgaaactactcctccaccgctaagaatttaggcagtagggccaggcatggtggctcacgcctgtaatcccagcactttgggaggccaaggtgggtggatgacctgaagtcaggagttcgagaccagcctgaccaacatggcaaaaccctgtctctactaaaaatacaaaaattagccaggtgtggtggcaggcgccaataatctcagctactccagaggctgaggcatgagaatcacttgaacctaggaggttgaagtaag

SEQ ID NO: 1471 - DNA, 753 bp, Homo sapiens
gtcccagctactcaggaggctgaagcgggagagtcacgtgaacccgggaagcagagtgagctgagcacacactactatactccaggctgggtaacaaagcgagactcccatctcccaaaaagcagttctggaatagaactcacgctagatggatagaccagtggacactttggaaccttggggctggggaggaaactgcccatccagtaaacccccaaaaagccatttgttctgcactacgtatattgcttattctttctggtcttaagtacttgcctctcaacctccctttttagtaaaagacaaggccacgtgagaggcgggactatcaacattgtgatgaatttacttgaaacccagtgcccaaaatcaatgtaggtagccaagtccaaaaacctgttctagtccaactagtgaaatcaaactgtgatacttggataagcttagaaggaaacgtgaagaatacgtagctgctttgggtttactctggttcagttgggctgttgaaatcttaacatccttgggcttatcacctactgcttgtcagccctgttccatgtccaggggatgggggtggtgacaatccagttccaagaccctcatgctctagagaggaaggtggccagccagggttgtaactacgatgaaaaagcagtgggagggtctcctatgaggcaagcctaaggacaaaaaggaaggccttgcagcctgtattctggataaggaattaaaagctcagttaattgaagccca

SEQ ID NO: 1472 - DNA, 38771 bp, Homo sapiens; identical to SEQ ID NO: 1148
  misc_feature (7892)..(9416): n equals a,t,g, or c

SEQ ID NO: 1473 - DNA, 945 bp, Homo sapiens
cagatttcctgagaagcctcttatcacagccagcacagacatctgtgcctttcctcgcctgagatgtcaccagctcagggccactccctgccccagccagatcaatgggcctttcacggcttctgagggtggatcctaggagtgcccctgtgacgaatgctcagatgactgcctctctaggatttctgtttgtttctgcttcgcagtcttccctccacccagaagctcccgaatgtccaggaagaattgactaattctctccatgagtttcttgcccacaggacgaatggagccattgctgtaacaaccttattttccactaagtcagaataagagacctggacagaaagagagtaatggctgaggcacaaggagcgagtattttaaatcaggcttatgaatgtgctctgtggatacggtttgcccatagggaggtggttttgggggttgcgaatcatactcaagctgtccctgaccgactcaccagtattctacaaacttactacaaacctctcaaaggaccatcttggaagacactagcaagggcgtgaacaatcccctctgacgttgctggctggtggtggaggccacggagcctccctgtgtgagactgtactatgtggtcactagaacgttttgaaagacagttctctgcaggcccggcaccgtggctcacgtctgtaatcccagcattttgggaggctgaggcgggtggatcacgaggtcaagagatcgagatcaccctggccaacatggtgaaaccctgtctctactaaaaatacaaaaattagccgggcgtggtggcgggcacctgtagtcctagctactcaggaggctgaggcaggagaatggcgtgaacccgggaggcggagcttgcagtgagctgagattgcgcaactacacttcagcctggcgatagagcgagactccatctcaaaaaaaaaa

SEQ ID NO: 1474 - DNA, 5775 bp, Homo sapiens; identical to SEQ ID NO: 1152

SEQ ID NO: 1475 - DNA, 738 bp, Homo sapiens; identical to SEQ ID NO: 1153

SEQ ID NO: 1476 - DNA, 352 bp, Homo sapiens
ctagaaaggggcctcaaccatgattatgagttgtctgtaaacctggaccagagttcaggtctccggatcctccatcaggaaatcacagggtggggtgagtaacatgaagccggcttccactctgggatgtcagattcctggcatggggtgatgcagggggcttggaacattccagaggaaacaaaagcgagatgagcagagacaaagagctgtgaacaccaggttcaaaatgcatgagtgagggtgttggaaaacttcccaggggtggtggctgcccaagtcaaaggacaccaacaggaaatgcaaagtcccagggtcccagggctagcaggaagctttgcctccaggctgt

SEQ ID NO: 1477 - DNA, 177 bp, Homo sapiens
aaaatacaaaaaaattagctgggcatggtggcgggcgcctgtagtcccagctacacgggaggctgaggcaggagaatggcgtgaacccaggaggcggagcttgcagtgagccaagattgtgccactgcactccagcctggatgacagagtgagactccgtctcaaaaaaaaataaaa

SEQ ID NO: 1478 - DNA, 20113 bp, Homo sapiens
gcccagcatgccccccatcgggctggataacgtggccacctatgcggggcagttcaaccaggactatctctcgggaatggtgagtccagctctcctgctgaggcagccctggggccacacctgcgtggccagaggaatcaaagctgctggcctctggggctccagagttgtctgtgtgtgtgttgctgtggtttgtagtgtgttgagctgtaccttagaacagggttttcatcaggcttctgccacctgctctctgcccctctctgggtctcacttttcccatctgtaaaatgaggggaaggggaccagatgatctcacaggtccctttcagccctgaggggttagggttgggaaggtggcgagggtatctgcatgagtgtgcatgcacgtgctatgtatgagtatccacattcatatacctgcatgtgcatgtgtgtacatatggagggctcttctggttaggccttggtgggtgtgtggcaggtatcttgggcagacatgctactttttaaatttgttgtttcacttttaaaataatacattttatgatttgaaaacaaacatatgcttagtttatgatttgaaaacaaacgtatgcttagaggaaattatgcaaccaatacacaccctaatttgtgccaggcccagttctaggcactggggatatgtgaataaaacaaacaaaaatctcagccgtgctgcacttatcatctatggggaaaagacaggcagtaccttaagtcaacgatgtgatgttattgaaagtgtaggtgccataggaacaagttgaccagggtaaaggggtcaggagtgggggtggggtgatgtaaggataatgattttaagttagcagtaaggtgggtctggctgaaaagaggatgtgtgagcaaagacctgcatcaggggaaggaagtgctgtatggatgtctagggaatgccggtgccctgaggtgccaaggggtgtgaggtgctcagggacagggaggagaggccagtgtggctaaagtggaaaggcgagggggtgagatgggaaatgaagtctgggggtctagctcttgcagggtgtaggaggctatccatcctaaggatttaggtttttattcctggtgagtgcagattcacctgaacatgcctgccagaggtgtctgtgggtagcaggctgatgtgatggggatgcccccaaccctgcatatgggacccacgcaccttcttgggcagtgagctcttaaccttcacccaggtggtctgggatgggaggagcaaccatgtggagagggaaggcatctcccctgcagaaggggatgaggatctctggtttggatcgagtcgcactgttcactggctgtgtaactttgagcaagtaaactcattctgtggtctgtgaaatgggtataacggtacttcatattccacaagcggagatgctgtgaggactgacttggcttaggtatgaaaaagggtggagggacggagtgcagcagggcccattggcctcaggctctgctttgtgtccttgcaggcggccaacatgtctgggacatttggaggagccaacatgcccaacctgtaccctggggcccctggggctggctacccaccagtgccccctggcggctttgggcagcccccctctgcccagcagcctgttcctccctatgggatgtatccacccccaggaggaaacccaccctccaggatgccctcatatccgccatacccaggggcccctgtgccgggccagcccatgccaccccccggacagcagcccccaggggcctaccctgggcagccaccagtgacctaccctggtcagcctccagtgccactccctgggcagcagcagccagtgccgagctacccaggatacccggggtctgggactgtcacccccgctgtgcccccaacccaggtgagtgtcagcccactgcctcccttggtccaggcctgggccccaaaggctggagacacatggctcagtagatggggagacagggaaaggcgcaggcctccagctgcacttcttgttttaacaaatagtgtcggccgggtgcagtgactcatgcctgtaatcccagcactttgggaagctgaggtgggcagatcgcttgagcccaggagttcaagaccaacctgggcgaaatggtgaaaccctatctctactaaaaatagaaaaaaaattagctgggcatggtggtgcatacctgtaggcccagctactcgggaggctgaggtgggaggatcacctcagcccaggagacagaggttgcagtgagccgggatcatgccgctgcactcactccagcctaggtgacagagtaagacccagtttttaaaacaaaaacaaaaacaaaaaaagacaaacaaagagcgtcaccttcttgcagactccccacctctgggttgtgttgcttaaggcccaagggagctgtcctgtttctcctggtgtgatgagacgctccacatccgagttgggtcagaacacccctggcgagtactccttattcctctgtgtcatttactgcctgggctgtgtgttttgtaagaactgcccaggccacctgtctcaagactttgtgctcaacagctgtcttcggtcccttgatatgcaccacccccgccccccccggcacagacaggttttggaggattattaaaattccctttgggtagggagaatgttggcagttcctccagggttgatcttggctcattttggagaacagttcgtgtttgcagagcctagaattcgttgtcatggttctgtggcccaaccagccagcacaggggtagtggtatgtgctcaatgactatttttagacagagggtctcctttcctccttcccttccatacccacacgttcccccaccctgtgccatcctccagcctccctcccttatcttttccctgagctgccctcttaattgtgttataaccagtttgtaccagcccctaggaagacaatccactgggagacagtttagcctggaaagttccagtttgcgggtttgtgcagctatcagggtctggaggaagtccggcagatgctagtctagagaacagtgcgagggaaccagtgctagatcaagaggtcatcaggctgccatgcacagttgtggaggctcaatacctgcatccactggaggggacacatgggctagccagccctgttaggagtacccatgtgtgctcacatgtgctgtggaggccaggcatcgatgagagaggccacagcccctgctcccgagacctgcccttcatcaggagcctgagccccagccctggaggacctgggcactgggcagattttcagcatcaggactcagctataggtgagctcccagccactggagccaggaaaaagcttcagtactagaacacaaggccagataacagtcaagttaggtagacgcggcgtaaagtcctctgcattgttgactgtggactcctttagatactccaactcttagagaaagggctgttcccagagtctaggggtggagcagccttgaatgtggggaaggcggcatgcacgacatcttacctgagactgtttgtccgagtagtttggaagccgaggcaccatcactgatgctcccggctttgaccccctgcgagatgccgaggtcctgcggaaggccatgaaaggcttcggtaagagaccctgggtggctcaaatcctactccctgccccctatttcccaggcagtttcactgtggctctgtgggctggggtagctgggggacgctgacctggccccagtggtgatagaaggtggatgtgggggtatggctagcatgcccagaacagttgaggggcccaggccagggaagtctcagctgcagagcatctcatgacccctacccgacccacccctgctgcctcttcctccagggacggatgagcaggccatcattgactgcctggggagtcgctccaacaagcagcggcagcagatcctactttccttcaagacggcttacggcaaggcgagctgcggggtgggggcgcgggacagtgaggcgtgtcctgggctcagcacagccctgctctcccctgcttttccttgggtgggcccggatctcccggatggacagtaaggagcaggagggcatttccttctgcccatccagctggtggcatcgttgggaggtgaaggatgccaccgggtgctgaggtttgctgagaggctccagacatctatccctgggttctagcccttgctctgccacatctcactgaggttgtggccacatcattttccttcccctgccctcttcatgaccaccctggggggtttagctgatgtaagagctttgcagggaaaggctgtgagtgctgcccaagtacgaggggcgtgtatgagcatattttgaacttctggggttttgaatcttagaaagataaaaattcggtaaatattgattagattcgtgttctagcccagtgcttctcaaacttcattgtgtcaccgatcccctgggcatcttggtaaaatgtggtctctgatttgggaggtttggggcagggctgagagcaggcttttctctcaggcccctgggggatgtccatgctgctgttcctcaaatctgggatatggctcttattagtcacttcctgtggattttttaaatagacttgtttttttttttgttggttgtttgtttgaatatccaatcaggatttgatcaaagatctgaaatctgaactgtcaggaaactttgagaagacaatcttggctctgatgaagaccccagtcctctttgacatttatgagataaaggaagccatcaaggtgtgtacgtgtgtgtgtgtgtgtgtgtgtgtgtgtgtgtgcgcgcgtgtgtgcgcacgcgcgcatgcgtgtggacacacagcccagaaggaggcctggatggcgtgctgtgttctagcccactcattagctgctgttgtcagtatggctcccaggccttcctgggttggagtccacatgctatagaaaagggaactccctgtgatttccccaagaggcaaatgacgcaccagtcatcatcagggaggcttaagtctctctccatcttaaagaaaagggggagctcgggtttgaaggttgcgattctgtggtaagaagaggggtaggaggccatggttggtatcgttctcattctttaggactctgttactagcaaatgacagaaacacacttcggtttaagaacaacaaaagtggagaatcagtcatgtgggtaaagagggcccaggccagacgtctctctggtctctgtctctcctgagcgcccgcttttctgtcagtttctgtgcttctcctaccatggctgcttcatgtggggtgggagagggggcctgtcgaccactctccgcataactatgagacccagctccagaagagaccagcagggtctccaaacgggcaggttctgacgggcccggcttggactcactgttccctccagtcctgcgggttttgactgagggttgggtcctgtccattctgtgcagtcccacagctctgtgtgcaccctgcaggcaggggcaggcagctcccttggaaagggaatcccatgagtcaggctggagcccagaaggagcctgtcactcagaggcctgataagcacagtgaatgttccctccttcaggagaagcagagacttcagtgtggtggcctggaaaggagaggggtctccgctgaaacacatctacatgtgttattctagggagggggtcaggaggccatcaggcagggcgatggcccggggccccagggagtggacccagacatctccctggcccccgtcttcagccggagtcatgagctggtggttgtggagtgttagaaaccacacaggtttggggcagctgtcactcaccagctgtgtgtccttgagcacctgtgaaatggggacagtggatgctgtctcaggacatgctgggaatactgggtgaggggctaacgtgtagtaacccaatagtagctgtagcaggaaacagctgacacaatgtcgcacgtcctgcctgacaggccctaagtgctctacgtacattaactcacttaatcctcatgactttcctgtgaggtaggtcctagtatcactcccatcttacagacaaggaactggaagcacagagaggttaagtaatgtgcccgaggtcacacagctggtaagctgcagagccaggattcaaaccaacatacaagccaggctgcccagcctgtcctctatggtcttactgtccctggcgtggttgtccgattcatccttgttgttcctaccttttcctagttgttttcagacattccaccatcccctctaggaccagggtttcgtatgtccacttggatctctcttgctttttacccatttttttcagttgttgtcatctcgcttccggctgaactctgaataaagcaggcctcggtccacattttaacccaaccatttactgtgtggcctcggaccagccagtacccctctctgatgctcagttttctgatccatggggatgcccctttgtgtgagccctactcatcaccactgccactgtcattgtgcttgcccgggctgtggagaagagctgatgccctcgagcctgggagtggctggagggtgtgtctctgtgtcaggggcctctgttgctgggattaaggcagcagcgtagcccccacccttcttcccgagtgctggtgaggctgctggaacaagcacatggttggttgtattctctgcccctgcagggggttggcactgatgaagcctgcctgattgagatcctcgcttcccgcagcaatgagcacatccgagaattaaacagagcctacaaagcaggtgaggccgctccctctgccctctgccctctgccctctgcagatccctgtgctcttggggctgtggcctcattctctcctagggccttttactccttcctggccttcttatcaacccatcttctgccacccccaatactttgggctttgacccaagacccagcccttccttctgtttatacatggtgcaaatgactaatgtaagggagaggcagggaaaacctggatgtggtttgggccaaggctgactagaggccaggtcagcctggaggtcacaggcttgtatatccctggagggccatatgggctatttgttctcttgagcccgagccaagacctccagcctttttctccccagtacccacttttgatagtgttttgcaatgggcagctccataaagagagctacaggatggaccttccttgcttctccctttcagaattcaaaaagaccctggaagaggccattcgaagcgacacatcagggcacttccagcggctcctcatctctctctctcaggtacttttcccacgacagggctcggggcccccaagccatggaagtcaaagagatgggatccccgcaatgaggaaagggaaaataaatggggaaggagtgggcatgaccatacacctgcttcctttcagggaaaccgtgatgaaagcacaaacgtggacatgtcactcgcccagagagatgcccaggtgagtgtgatggccaagcccctggacttcctaaagcagggatgcaccccgctttcttgcttcctgagagaggtaccctagggtggaaagaacaatagataagcagtgggttgcagatgctgtgagtttcagacgcgctgaactgttcaactgtatgacctagaacaggtaatctgacctccagggcttcagcttccccacctataggagggaacatgtgagataattagtatttcgatagttgatagatcatggttttggacgtgggattttgtgtgacagcgtactttccccatgtttagttgcacatagcattatgtttgcaaaggggcaaaatttgcacttgcttattaagtttttgaggatttgagcctagaaaccagctgccacattagttgagcacccttagaattctgtcgttgtccctcttgtgagttgcagacaaaaggggaaaagtccaagcaaagtccaggcatctgagctactctctcgaaaagtttgggtttcccactaatgaatttcaaccgtagtattatggcagggcagagccattacttcctggtggggtggagttggccatacctctctgtctcccttcactgctcttgtcatccacggcagggcattcaccaggagctgccagtggtctaaattatctctaccatctgcgggattggaatgagacctcaaggaatgcccccttgttagggctggaggagagctactcctctggtctggtccttttgctggtcctccttttccggaggaggaaactgaggctcaaaaaggttgagcactgttcccaactgaaagctagaagcagagcccggacaagggcctatactcctggctcggtcttctgtgcccagtcagcacttgcctctgccctggtctcagacctgctgctcctgcagggtctgccttattcagtgtctctctggctggtaacatccattcccattctgggagtcagggctggacacgcctggggctcagggctctggcttttgctccagcgagagttttgcatgccacttttagcggggcaaaaattgtctcatgctctgccttctcagtccagagctgctttggcctcatcttgacctgtgggatctcagcccctgattgctgctttctgctctttttcagggctgctacctgaggcctagcaggcactttagaggccatctagttcagaggttgcaaattggcaaatactttaggctcaaaccttcagaagtttaccaggctctcctgggtgacctgggcctggggtctgggtgtggcctgtgccacatgtgcgtcttcctctctctccaggagctgtatgcggccggggagaaccgcctgggaacagacgagtccaagttcaatgcggttctgtgctcccggagccgggcccacctggtagcaggtaaggcaggctggggtccctcagaggccagttagatgagggcagtcaggggattgtggggaaacaaagctatgggaacacttggtcgttcctccctgcgtggggctttcgcctcctcaaaagagccccctggtgggaatttaaaagacactgtcagagggtttcctgagttctggcaaacatccagttctggaggttctaccggtgtagaaacctggtgtctttgtacgtgggaatgtggaacgtcagagttgggagggtccttcgggagcacccaatccagtgttttccaaagcctggcataagaaacagtcataacaataaaactgggtgccattcatttactcattcattcaacagatgtaaatcgcgctcccgcatgggtcagtctgtcaggtggtggagcaggtgtggggccacggtggggggcagggcactgcagagtgtgttccatgggctgcactttctcatttggggagacagacagtaaacaacaatgaaataaaatctgtatcagatgggaaatcctgtagaggaaaatcaagctggaaacaggtagggagtgatggtagggtccaccgggaggtgcttgggccagtccccactgaggtcgtgacatttgatttaaaaacctaaagggagatgcaggggcagaggcctgcctggggctcccagcacgactgagaacagtgaagggggaccatgtggagcaggtggagtgagcaagaggagtgggaggtgagggcagagaggggagagggccctgctgatgacttcccggagctgggtatttatcctgagcaaaagaggaagccagtggagggccctgagcagaggaggctgtgcagaatccctggctgtggtgccgagaatggagtgaagggtgcaaggccaagcagcgaagcctgtcgggaggctgctgcagggacccggggaggaatggtggtaataggggcttgtggtgaggaggtgtcaggttccggccatgtttgctgatgaattggacacgtgacgtgtgggagagagagggttcgaggattatacagggtttctttaggccaagcagtgggagaatggccctcaactgagacagggggactgtaggtggagctggctttaggtgcctgtagggtggagctgcagggaggctgctgggttgctgagtgtggaggtcaggagaggtctggcctggttgtggaaggtaagggagctatgggtagttgaagttatctgaggctctgggactgcaggaggtcccctcaggagggagactgtggggagcccaccggtgtgaggagactaagaaggagcagctagggagggaggaggacgcagaggaagggggtcctggaggccagtgtgaggtggcaggcaaggactgaggatggtgaccacacggagcaactggtgggctgtggccagggctgctccagtgggcagtgagggtgaaaacccagcgaccgctctgtgctgcacacagagacaggcgctgtggctctccccattcgcagctgtgaaagcaggcacagggtggtagaggaagtaggggtgcacagctagtaacagctgagctgggatttgaacccagaccacccgaccccagagcacactttttaacctctgcactatcctgtaatggagcctgagtgaaagcattttcatcttaatcattatttcttttaatgagtacagaacatgtaagtagtgcatcaagcccatggcttcacaaacattattacttaggagaaaagagtagctgattggaagaagatattaattgagacagatacacacagagcagaaatcacaactttaaaatgcaaatggtagctgagactcaggctggggaaggagagttttatgtcctgggtcagaactggagtcaggaccaaggtctccatcatgccacctgtctctctaggagccagccatccactcctgtgggtgcttagcgtgtcctaggtcgaggtgagcagcaagaagccaggctggctggggcaggctgggcctcagctcacaggcaggctgaggaagacagatggatgcatgaataaagccaaggaatggcagagactggaggtgtggaggatttgacaagagggaaaaaatgtcttggagtacataaaagtggccctggaggggtattaaggtgcgatttggttaagcagattggcagtcctgagaaagggaccacacagggagggacatcaggtggtgcatgtaacttgtgacgaagactctgacttccttgagcgctagcaggcctggggacgtgcagggtgtgggagcagagtggcaggtgggagattttggggcagaggccacctcatgtgagtcctctgttagtctgctcatgctgccatgacaaaataccacagactgggtggcttaagcagcagatactcattttgttacagttttgaaggccagatatccaagagtggggtgccggtttctcccgtggcctcttcgtgacaatcactgtgctcacatggtctttcctctgcatgtgcacatccctgggatctctgtgtgtgtcctaatcttctcttcttctaaggagaccaggcgaattggattagggtacaccctagcagcatgttttaacttaattacctctttaaagatcttatctccaaacacggttatattctgaagtcctgggagttgggacttccacatatgaactttggggagacacatttcagttcataatataagcctctgtcatccccatagttttcaatgagtaccagagaatgacaggccgggacattgagaagagcatctgccgggagatgtccggggacctggaggagggcatgctggccgtgggtaagtgtctcaggtttgccgcccacctgccaggggctaacgtgtatcgtgagtgttcaggctgctcgcctgtcctccagctgatgggtgacaccgtgaagggaccacaggatccaagatcgctcagcccagagtgtccagatgctgggaagtcatgctgcttcccggttccctgtgcagttgaacccctagctgtcctggaggtgtcttgtgtgtgtttgcggtgcagctctggagtagggaactgcagtgtgggtattagtgggagggcatccaactgcgctcccggaggagtatgactcatatcctgccacgtttcctctaaaaatacatccctgcaggcagttgtcagatgtttgtgatggaaacacgtggaaagatttttacttgcagcagcgaaacaggcccatgctgaggaaagctggcttggctccaggatggtggtgtgcctcttacattgcccatgtcctctagcagggccctcccactgtgcagagttgggtccctgccctgaggccctcacaacccctctttctactcacttgggaaaatcagtctgccccttttttcattatgctttttttggagctttctggatgggagagatggaaaatcctcatttccctgcctgtcccccatagtaggtctcatggcctgggaagcctagggagatgcacattccactcagccacggtttctccatgacggtcatggcctctccagtctgcccctcctgcctgagcagcagcacagttcctcatcaccatccacattgcttccctgtgtagctcctagccccactaagacccccgcccctctgactcttggtcctttcaccgcagtggttgccaggaaagagggtgggttggtttccaggctttgcgtgtttctgttccaaatagctggagccaagatcatgggatagttgagcctggaacagaaggaggaggagaaaagatggatgcagtgatgggtttgacatctgggcctctaagaggacacttgtagactccatgccctgcttgggctgagaattttctgcagatctggttatgccgagtttctctcttctagtgaaatgtctcaagaataccccagccttctttgcggagaggctcaacaaggccatgagggtatgtaacttccatgtgcaggttgcgatggaaccttagcctcgcctgtgcctgggaccaagggctgagggcagaaggcctggggagagctaaatctcagctgagagttccgaggacctgggtagggaggggactggagggcccagggcaggtgggaaggtgaggaggcctggtgctcatgctcttgggtggactctctttagggggcaggaacaaaggaccggaccctgattcgcatcatggtgtctcgcagcgagaccgacctcctggacatcagatcagagtataagcggatgtacggcaagtcgctgtaccacgacatctcggtacgggcctgctgcaggccaactgggctcccttttggcatctcagtcacctgtggaacctccctccttggagtggccatatgcttggcctctgtgctgtgtgtgggcatcttgattatggacctcggacttgttcatccccttgcccttaaacagattataaatttctgagggcaggtggatcatgaccttgctgtcgcccccaccttgcatcccccagcagcatcagagaacactcgggacctccccaaccttgaccgtgaccttcagcgttccgatcaccgtgtgattccttgatctgtcagtgagaactcatgtcccaaaggctctgtggagctctgctgtcactccctgacaaagcacttcctgcactcagctttatggcgtaggccacatagtaaggccgttcagagcgagggccctgggggtcacgccacttggagtccagcttttctacttgctaactgtgtgaccttgaatggctcccttaaatctccctgaaccccagctccattgtctttaagatgagaaaataatcgttccttcctgggaatgttgtgagtattgagtgaggcagtgcaggtcaagtgtctattaaacactagccacagttgtatcgctgtgtggcagagccagtctgacaaaatacattctcagctgtgtggtctaacgctcaaattctgaactcacatgagccttgcaattgcaccatggggaccacgtcctcccaccttagactcagtagcatttgatgatggtgggcatgtcatcacaggaaactcactgtgtttccttggctgtatgaatgaagctgttgttagagaattagtgattctaggctgggcacagtggctcacgcctgtaatcccagcactttgggaggctgaggcaggtggatcatttgaggtcaggagttcgagaccagcctggccaacaaggtaaaaccctgtctctactaaaaatacaaaattagctgggcttgcctgtaatcccagctaattaggtaggctgcggcaggagaattgcttgaacccgggagacagaggttgcagtgagctgggatcacgccattccacttcagtcttggtgacagagtgagacttcgtctcaaaaaaaaaaagagagttaataattcattacagagtatctcctgcatgccagcaagctatggacatctggaagaagccacatgccttgccctcaagttgcttagggtggaaggaaatgattagaaatgagccaagccgagcctgcactcttagagtaagtgtagtggcctcagacagaggagagatccctgggacctgggcagtctgagccttccactggacagtcatgtgtgaggagattgcatttcctgagcaggacactgtgttgcgttacattggtaaccccaatttaaggcagcataaatgcactgggaaaacagcaatattggttagccctgggaagtggtttttaggatgattataatttttttttgtgggtattcatttgatgtggatagctggggtgagtgctgctttccgtcttctgatgggggcctggagaaggctgaactgcattttttaaggtctgtgacgcctgctgcaggacctgcagtgggagaaaattccccagggtggggctttctccctataagggtgctcagggctgaatatcaggacccagaaggctgaaagtgactgtccctcccttaacggatgtcttccttgtttctgtggccagggagatacttcaggggattaccggaagattctgctgaagatctgtggtggcaatgactgaacagtgactggtggctcacttctgcccacctgccggcaacaccagtgccaggaaaaggccaaaagaatgtctgtttctaacaaatccacaaatagccccgagattcaccgtcctagagcttaggcctgtcttccacccctcctgacccgtatagtgtgccacaggacctgggtcggtctagaactctctcaggatgccttttctaccccatccctcacagcctcttgctgctaaaatagatgtttcatttttctgactcatgcaatcattcccctttgcctgtggctaagacttggcttcatttcgtcatgtaattgtatatttttatttggaggcatattttcttttcttacagtcattgccagacagaggcatacaagtctgtttgctgcatacacatttctggtgagggcgactgggtgggtgaagcaccgtgtcctcgctgaggagagaaagggaggcgtgcctgagaaggtagcctgtgcatctggtgagtgtgtcacgagctttgttactgccaaactcactcctttttagaaaaaacaaaaaaaaagggccagaaagtcattccttccatcttccttgcagaaaccacgagaacaaagccagttccctgtcagtgacagggcttcttgtaatttgtggtatgtgccttaaacctgaatgtctgtagccaaaacttgtttccacattaagagtcagccagctctggaatggtctggaaatgtcttcctggtaccaacttgttttcttctgcttgattctgccctgtggctcagaggtctggccttatcagccagtgaaagttcatgtaaccttacgtagagatttgtgtgcaggaaaccctgagcatacactagtttgcagggactcgtaaggacatgggaagggaggttcccgaaatccaggcaggaggcccagacacctgaaaggcaaagggatcttggttggttgcaggtgcagtgaagtccactgaaggtgtggtgcgaagaatgcagtccttcacccaggtcccaggagggaagaagggtgtgtgctaattcctggtgcccctcggcgggggccagagagaaggatggggacaacccagagagtcacaagaccagtgcctcccctcagggtgcctccaggctgaaaggggctcctggctctggtctctggggaccctgtgcccgttggttggtggtgtgagggaagagaatccataagagagtttctgagaattatggtgtcatgtccagaagctagagcttaccttgcatcaggggtctccacccactccttttccaacctcctgcgttgaggtttagaaaagagagaatcgactaggcactatggctcacgcctgtaatccaaggactttgggaagctgaggtgagaggatcacttgagctcaggagttcaagactagcctagccaacagcgagacccctgtctctactaaaaaatttggccaggcgtggtggctcacggctgtaatcccagcactttgggaggtgaggcgggcagatcacctgaggtcaggagttcgagacccagcctggccaacatggtgaaaccccatctctactaaaaatacaaaaattagccaggcatggtggcacattcctgtaatcccagctacacaggatgctgaggcaggagaatcacttgaacccaggaggcagaggttgtagtgagctgagatcacaccattgcacttcaacctgggtggacagagtgagactctgtctcaaaaaaaaaaaaaaatttacctggcattgtagtgcattccctatagtcggctactctggaggctgaggcaggaagatccttagagcccaagaaattgaggccgtagtaagctgtgattacaccactgcactccagcctggacaacagagcgagaccttgtctcaaatgagaaaaaaacaaaaagaaatgggagaatccagagagactaggctagatcaagcctgctgggtcctggcaggagccccagggagtagctcatctgcagacatttgcttgaggactaccccctaaacataaaggaagaatgacatccgaagggtgtggagcagccatgagctgagaactagcctggtctacctgagattgatggcaggtcctggtcaacacgtcagctctgcgtcagagtccatgcctcaagcccaagctgaagccccatccctgctgctctcccaagaactcctctgctaggccaggccccttgcccttgggtgccaggtgggacctgcctgatgggatggggtgcttggcatatacaacttgccatgaactcccgccgcaaaatgggggcctcctgaaatagtgaggggacactagaaccaatgtgctctgatgtgaccatattctgtgacattaccatgccctgtttactccaaagttcccagcctggtgcccagcaggcaatattgcacctacagacacatttactttggtttccaaagtgtttttagacatttgaatttgttgccaacatttaaacattgagagatttcatatttttaaaaatctggaattctggcttctcttgaaaactcagaaattctggcactatggggcttgcattcctgcatggctggagctgagttgcagctgcccctttaggcctgtactccttatttgctataggctccgtcttgtattacactaagcccatgtcacccatttggctcctgcaggcctttgggtttgagaccctggtctacacacttggagaccacctgttgtaaagtacatggatgtgctttggtcaaggaatagaccaaggtggatatccaggccagagtgactcagcgagtttaggtcacaggcgtatactccacttgttatataacctgcttgtgtaagttcatacttggctcaaagccactattgtttggaaaaggtataactgccctgctgacgctgtacagatgttcttgggctcggatgggcatggctccacgtggtgtgcactagcacccagagagagtgaagctattgacccctgtaagggagagtgaccatctggcagatagatagaggggagccaggacatggctcagcttgtgcccagagggagagttaagccgctgaccctgtagccagggagtgcacctgcaagcatgggggtggcaggagccacagagctggctgctgagaggagctgcagatctggagaagacagcctaggtaaaggtggacagtgtgagagctgctgatgagatagctgctgaataaaactacattttacctgcctatggcccgccaggttttctttcagctatcgcccatccacccagtcccctcgaacctcagcatgggctggaacctgaccctgggcatgacatttggcatagttgtggacctgacacctgtgtttgtcctagtcctgtttctccctgccttcctgttcctctcgctgccctcatggtcactcccaagagatccaacccatgttaagtatgggctggaggactgcatgaatgcctcatgatcttcccagaggcaaaggcacctactgccttccaaggtcagtgggaggttgggatcaacactgtttattatgcttaggacaaaaaagatagggagaaagatgtgcaaccttacaggtcatctttctgggatagaacacaatgggtcttctcctgcctcctggatatgttagtcaaggccagtccatgctacacatctagtctgacttctaaaatagaagcaccagatgaattcagccctgagagaattttcagcagctgtgggggcgctggaggaaacactattaaatagttttgcacctgagacagatagcctcactcgcctcaccctagtcctggtggcatttgtctcaggtgcaaaatttaagaaagaaaccttggagtgctcaccctgtggctgggtagatggtcctaaagtggtggttttcaagcctgagtgtgtatcaggatcatcaggggagcttgctaaagagcagttcctgcggtcagaccctcatgcattttgagcaggtgtggggactgggaaactgcatctgtaacctgctgtaatctaacgcttatctaaatactactgtgctcacacagagaacaccgcaaaagtagaggtgttcctccagagggcaggtgagcagatggcacagtctgcttggaattcagtcaggtgatgagagatgagatgaggcactcctagctttgggaagagggagctgaaagatgaacctttgcaggtgcccacggtcaaagtggtggtttaatgccatgccatgcccattttctgttggccttggcagggagttacagccctaccttaggacctggctccttatttctgctgtaggctctttcctgccctggccgagatggagtggaatgagacctagaaacatcaagctaaatacatgtcctcagaaagataaaggtttacattttcacccccatcaaatctgaaagctctctgcctgtgtttttctaagggatagggacatcattactcagtccacaacctggactcatgtagggtcccctgtcagtaaaggagtcagtcaagcccaccaggtataccaaggactcttaccctcagcccctactccttggaaagctgccccttggcctaatattggtgtttagcttgagcctgactccttctcaacactaagagctgatgaagtcctgaagcagaaagagctctgacctgagagtcaaacatccttattctgatctcagctcagcccctgatttgttgtgtgaccctggatatgtcacttcctgtctttttgactttttaaaatgaagggtagactagaggagagcttctaaaactttaatgtggtcaacgaaatggaataggaaattccacaagtctgtccttccacaaaagcagcaaataaggtggcaaaaactcaaatttatgggaactctggaaacgaattgaaagtttacagcaatcaggtgaatacctaagaataaaagctggatttagtaagagagctttgttgtgttttagcttaccctggccccatcccccactccccagcatggcagcagcatcaaaaacaatatccctcattccctgtataggttcctgtcactggaggtagcagatta

SEQ ID NO: 1479 - DNA, 20110 bp, Homo sapiens
gcccagcatgccccccatcgggctggataacgtggccacctatgcggggcagttcaaccaggactatctctcgggaatggtgagtccagctctcctgctgaggcagccctggggccacacctgcgtggccagaggaatcaaagctgctggcctctggggctccagagttgtctgtgtgtgtgttgctgtggtttgtagtgtgttgagctgtaccttagaacagggttttcatcaggcttctgccacctgctctctgcccctctctgggtctcacttttcccatctgtaaaatgaggggaaggggaccagatgatctcacaggtccctttcagccctgaggggttagggttgggaaggtggcgagggtatctgcatgagtgtgcatgcacgtgctatgtatgagtatccacattcatatacctgcatgtgcatgtgtgtacatatggagggctcttctggttaggccttggtgggtgtgtggcaggtatcttgggcagacatgctactttttaaatttgttgtttcacttttaaaataatacattttatgatttgaaaacaaacatatgcttagtttatgatttgaaaacaaacgtatgcttagaggaaattatgcaaccaatacacaccctaatttgtgccaggcccagttctaggcactggggatatgtgaataaaacaaacaaaaatctcagccgtgctgcacttatcatctatggggaaaagacaggcagtaccttaagtcaacgatgtgatgttattgaaagtgtaggtgccataggaacaagttgaccagggtaaaggggtcaggagtgggggtggggtgatgtaaggataatgattttaagttagcagtaaggtgggtctggctgaaaagaggatgtgtgagcaaagacctgcatcaggggaaggaagtgctgtatggatgtctagggaatgccggtgccctgaggtgccaaggggtgtgaggtgctcagggacagggaggagaggccagtgtggctaaagtggaaaggcgagggggtgagatgggaaatgaagtctgggggtctagctcttgcagggtgtaggaggctatccatcctaaggatttaggtttttattcctggtgagtgcagattcacctgaacatgcctgccagaggtgtctgtgggtagcaggctgatgtgatggggatgcccccaaccctgcatatgggacccacgcaccttcttgggcagtgagctcttaaccttcacccaggtggtctgggatgggaggagcaaccatgtggagagggaaggcatctcccctgcagaaggggatgaggatctctggtttggatcgagtcgcactgttcactggctgtgtaactttgagcaagtaaactcattctgtggtctgtgaaatgggtataacggtacttcatattccacaagcggagatgctgtgaggactgacttggcttaggtatgaaaaagggtggagggacggagtgcagcagggcccattggcctcaggctctgctttgtgtccttgcaggcggccaacatgtctgggacatttggaggagccaacatgcccaacctgtaccctggggcccctggggctggctacccaccagtgccccctggcggctttgggcagcccccctctgcccagcagcctgttcctccctatgggatgtatccacccccaggaggaaacccaccctccaggatgccctcatatccgccatacccaggggcccctgtgccgggccagcccatgccaccccccggacagcagcccccaggggcctaccctgggcagccaccagtgacctaccctggtcagcctccagtgccactccctgggcagcagcagccagtgccgagctacccaggatacccggggtctgggactgtcacccccgctgtgcccccaacccaggtgagtgtcagcccactgcctcccttggtccaggcctgggccccaaaggctggagacacatggctcagtagatggggagacagggaaaggcgcaggcctccagctgcacttcttgttttaacaaatagtgtcggccgggtgcagtgactcatgcctgtaatcccagcactttgggaagctgaggtgggcagatcgcttgagcccaggagttcaagaccaacctgggcgaaatggtgaaaccctatctctactaaaaatagaaaaaaaattagctgggcatggtggtgcatacctgtaggcccagctactcgggaggctgaggtgggaggatcacctcagcccaggagacagaggttgcagtgagccgggatcatgccgctgcactcactccagcctaggtgacagagtaagacccagtttttaaaacaaaaacaaaaacaaaaaaagacaaacaaagagcgtcaccttcttgcagactccccacctctgggttgtgttgcttaaggcccaagggagctgtcctgtttctcctggtgtgatgagacgctccacatccgagttgggtcagaacacccctggcgagtactccttattcctctgtgtcatttactgcctgggctgtgtgttttgtaagaactgcccaggccacctgtctcaagactttgtgctcaacagctgtcttcggtcccttgatatgcaccacccccgccccccccggcacagacaggttttggaggattattaaaattccctttgggtagggagaatgttggcagttcctccagggttgatcttggctcattttggagaacagttcgtgtttgcagagcctagaattcgttgtcatggttctgtggcccaaccagccagcacaggggtagtggtatgtgctcaatgactatttttagacagagggtctcctttcctccttcccttccatacccacacgttcccccaccctgtgccatcctccagcctccctcccttatcttttccctgagctgccctcttaattgtgttataaccagtttgtaccagcccctaggaagacaatccactgggagacagtttagcctggaaagttccagtttgcgggtttgtgcagctatcagggtctggaggaagtccggcagatgctagtctagagaacagtgcgagggaaccagtgctagatcaagaggtcatcaggctgccatgcacagttgtggaggctcaatacctgcatccactggaggggacacatgggctagccagccctgttaggagtacccatgtgtgctcacatgtgctgtggaggccaggcatcgatgagagaggccacagcccctgctcccgagacctgcccttcatcaggagcctgagccccagccctggaggacctgggcactgggcagattttcagcatcaggactcagctataggtgagctcccagccactggagccaggaaaaagcttcagtactagaacacaaggccagataacagtcaagttaggtagacgcggcgtaaagtcctctgcattgttgactgtggactcctttagatactccaactcttagagaaagggctgttcccagagtctaggggtggagcagccttgaatgtggggaaggcggcatgcacgacatcttacctgagactgtttgtccgagtagtttggaagccgaggcaccatcactgatgctcccggctttgaccccctgcgagatgccgaggtcctgcggaaggccatgaaaggcttcggtaagagaccctgggtggctcaaatcctactccctgccccctatttcccaggcagtttcactgtggctctgtgggctggggtagctgggggacgctgacctggccccagtggtgatagaaggtggatgtgggggtatggctagcatgcccagaacagttgaggggcccaggccagggaagtctcagctgcagagcatctcatgacccctacccgacccacccctgctgcctcttcctccagggacggatgagcaggccatcattgactgcctggggagtcgctccaacaagcagcggcagcagatcctactttccttcaagacggcttacggcaaggcgagctgcggggtgggggcgcgggacagtgaggcgtgtcctgggctcagcacagccctgctctcccctgcttttccttgggtgggcccggatctcccggatggacagtaaggagcaggagggcatttccttctgcccatccagctggtggcatcgttgggaggtgaaggatgccaccgggtgctgaggtttgctgagaggctccagacatctatccctgggttctagcccttgctctgccacatctcactgaggttgtggccacatcattttccttcccctgccctcttcatgaccaccctggggggtttagctgatgtaagagctttgcagggaaaggctgtgagtgctgcccaagtacgaggggcgtgtatgagcatattttgaacttctggggttttgaatcttagaaagataaaaattcggtaaatattgattagattcgtgttctagcccagtgcttctcaaacttcattgtgtcaccgatcccctgggcatcttggtaaaatgtggtctctgatttgggaggtttggggcagggctgagagcaggcttttctctcaggcccctgggggatgtccatgctgctgttcctcaaatctgggatatggctcttattagtcacttcctgtggattttttaaatagacttgtttttttttttgttggttgtttgtttgaatatccaatcaggatttgatcaaagatctgaaatctgaactgtcaggaaactttgagaagacaatcttggctctgatgaagaccccagtcctctttgacatttatgagataaaggaagccatcaaggtgtgtacgtgtgtgtgtgtgtgtgtgtgtgtgtgtgtgtgcgcgcgtgtgtgcgcacgcgcgcatgcgtgtggacacacagcccagaaggaggcctggatggcgtgctgtgttctagcccactcattagctgctgttgtcagtatggctcccaggccttcctgggttggagtccacatgctatagaaaagggaactccctgtgatttccccaagaggcaaatgacgcaccagtcatcatcagggaggcttaagtctctctccatcttaaagaaaagggggagctcgggtttgaaggttgcgattctgtggtaagaagaggggtaggaggccatggttggtatcgttctcattctttaggactctgttactagcaaatgacagaaacacacttcggtttaagaacaacaaaagtggagaatcagtcatgtgggtaaagagggcccaggccagacgtctctctggtctctgtctctcctgagcgcccgcttttctgtcagtttctgtgcttctcctaccatggctgcttcatgtggggtgggagagggggcctgtcgaccactctccgcataactatgagacccagctccagaagagaccagcagggtctccaaacgggcaggttctgacgggcccggcttggactcactgttccctccagtcctgcgggttttgactgagggttgggtcctgtccattctgtgcagtcccacagctctgtgtgcaccctgcaggcaggggcaggcagctcccttggaaagggaatcccatgagtcaggctggagcccagaaggagcctgtcactcagaggcctgataagcacagtgaatgttccctccttcaggagaagcagagacttcagtgtggtggcctggaaaggagaggggtctccgctgaaacacatctacatgtgttattctagggagggggtcaggaggccatcaggcagggcgatggcccggggccccagggagtggacccagacatctccctggcccccgtcttcagccggagtcatgagctggtggttgtggagtgttagaaaccacacaggtttggggcagctgtcactcaccagctgtgtgtccttgagcacctgtgaaatggggacagtggatgctgtctcaggacatgctgggaatactgggtgaggggctaacgtgtagtaacccaatagtagctgtagcaggaaacagctgacacaatgtcgcacgtcctgcctgacaggccctaagtgctctacgtacattaactcacttaatcctcatgactttcctgtgaggtaggtcctagtatcactcccatcttacagacaaggaactggaagcacagagaggttaagtaatgtgcccgaggtcacacagctggtaagctgcagagccaggattcaaaccaacatacaagccaggctgcccagcctgtcctctatggtcttactgtccctggcgtggttgtccgattcatccttgttgttcctaccttttcctagttgttttcagacattccaccatcccctctaggaccagggtttcgtatgtccacttggatctctcttgctttttacccatttttttcagttgttgtcatctcgcttccggctgaactctgaataaagcaggcctcggtccacattttaacccaaccatttactgtgtggcctcggaccagccagtacccctctctgatgctcagttttctgatccatggggatgcccctttgtgtgagccctactcatcaccactgccactgtcattgtgcttgcccgggctgtggagaagagctgatgccctcgagcctgggagtggctggagggtgtgtctctgtgtcaggggcctctgttgctgggattaaggcagcagcgtagcccccacccttcttcccgagtgctggtgaggctgctggaacaagcacatggttggttgtattctctgcccctgcagggggttggcactgatgaagcctgcctgattgagatcctcgcttcccgcagcaatgagcacatccgagaattaaacagagcctacaaagcaggtgaggccgctccctctgccctctgccctctgccctctgcagatccctgtgctcttggggctgtggcctcattctctcctagggccttttactccttcctggccttcttatcaacccatcttctgccacccccaatactttgggctttgacccaagacccagcccttccttctgtttatacatggtgcaaatgactaatgtaagggagaggcagggaaaacctggatgtggtttgggccaaggctgactagaggccaggtcagcctggaggtcacaggcttgtatatccctggagggccatatgggctatttgttctcttgagcccgagccaagacctccagcctttttctccccagtacccacttttgatagtgttttgcaatgggcagctccataaagagagctacaggatggaccttccttgcttctccctttcagaattcaaaaagaccctggaagaggccattcgaagcgacacatcagggcacttccagcggctcctcatctctctctctcaggtacttttcccaccacagggctcggggcccccaagccatggaagtcaaagagatgggatccccgcaatgaggaaagggaaaataaatggggaaggagtgggcatgaccatacacctgcttcctttcagggaaaccgtgatgaaagcacaaacgtggacatgtcactcgcccagagagatgcccaggtgagtgtgatggccaagcccctggacttcctaaagcagggatgcaccccgctttcttgcttcctgagagaggtaccctagggtggaaagaacaatagataagcagtgggttgcagatgctgtgagtttcagacgcgctgaactgttcaactgtatgacctagaacaggtaatctgacctccagggcttcagcttccccacctataggagggaacatgtgagataattagtatttcgatagttgatagatcatggttttggacgtgggattttgtgtgacagcgtactttccccatgtttagttgcacatagcattatgtttgcaaaggggcaaaatttgcacttgcttattaagtttttgaggatttgagcctagaaaccagctgccacattagttgagcacccttagaattctgtcgttgtccctcttgtgagttgcagacaaaaggggaaaagtccaagcaaagtccaggcatctgagctactctctcgaaaagtttgggtttcccactaatgaatttcaaccgtagtattatggcagggcagagccattacttcctggtggggtggagttggccatacctctctgtctcccttcactgctcttgtcatccacggcagggcattcaccaggagctgccagtggtctaaattatctctaccatctgcgggattggaatgagacctcaaggaatgcccccttgttagggctggaggagagctactcctctggtctggtccttttgctggtcctccttttccggaggaggaaactgaggctcaaaaaggttgagcactgttcccaactgaaagctagaagcagagcccggacaagggcctatactcctggctcggtcttctgtgcccagtcagcacttgcctctgccctggtctcagacctgctgctcctgcagggtctgccttattcagtgtctctctggctggtaacatccattcccattctgggagtcagggctggacacgcctggggctcagggctctggcttttgctccagcgagagttttgcatgccacttttagcggggcaaaaattgtctcatgctctgccttctcagtccagagctgctttggcctcatcttgacctgtgggatctcagcccctgattgctgctttctgctctttttcagggctgctacctgaggcctagcaggcactttagaggccatctagttcagaggttgcaaattggcaaatactttaggctcaaaccttcagaagtttaccaggctctcctgggtgacctgggcctggggtctgggtgtggcctgtgccacatgtgcgtcttcctctctctccaggagctgtatgcggccggggagaaccgcctgggaacagacgagtccaagttcaatgcggttctgtgctcccggagccgggcccacctggtagcaggtaaggcaggctggggtccctcagaggccagttagatgagggcagtcaggggattgtggggaaacaaagctatgggaacacttggtcgttcctccctgcgtggggctttcgcctcctcaaaagagccccctggtgggaatttaaaagacactgtcagagggtttcctgagttctggcaaacatccagttctggaggttctaccggtgtagaaacctggtgtctttgtacgtgggaatgtggaacgtcagagttgggagggtccttcgggagcacccaatccagtgttttccaaagcctggcataagaaacagtcataacaataaaactgggtgccattcatttactcattcattcaacagatgtaaatcgcgctcccgcatgggtcagtctgtcaggtggtggagcaggtgtggggccacggtggggggcagggcactgcagagtgtgttccatgggctgcactttctcatttggggagacagacagtaaacaacaatgaaataaaatctgtatcagatgggaaatcctgtagaggaaaatcaagctggaaacaggtagggagtgatggtagggtccaccgggaggtgcttgggccagtccccactgaggtcgtgacatttgatttaaaaacctaaagggagatgcaggggcagaggcctgcctggggctcccagcacgactgagaacagtgaagggggaccatgtggagcaggtggagtgagcaagaggagtgggaggtgagggcagagaggggagagggccctgctgatgacttcccggagctgggtatttatcctgagcaaaagaggaagccagtggagggccctgagcagaggaggctgtgcagaatccctggctgtggtgccgagaatggagtgaagggtgcaaggccaagcagcgaagcctgtcgggaggctgctgcagggacccggggaggaatggtggtaataggggcttgtggtgaggaggtgtcaggttccggccatgtttgctgatgaattggacacgtgacgtgtgggagagagagggttcgaggattatacagggtttctttaggccaagcagtgggagaatggccctcaactgagacagggggactgtaggtggagctggctttaggtgcctgtagggtggagctgcagggaggctgctgggttgctgagtgtggaggtcaggagaggtctggcctggttgtggaaggtaagggagctatgggtagttgaagttatctgaggctctgggactgcaggaggtcccctcaggagggagactgtggggagcccaccggtgtgaggagactaagaaggagcagctagggagggaggaggacgcagaggaagggggtcctggaggccagtgtgaggtggcaggcaaggactgaggatggtgaccacacggagcaactggtgggctgtggccagggctgctccagtgggcagtgagggtgaaaacccagcgaccgctctgtgctgcacacagagacaggcgctgtggctctccccattcgcagctgtgaaagcaggcacagggtggtagaggaagtaggggtgcacagctagtaacagctgagctgggatttgaacccagaccacccgaccccagagcacactttttaacctctgcactatcctgtaatggagcctgagtgaaagcattttcatcttaatcattatttcttttaatgagtacagaacatgtaagtagtgcatcaagcccatggcttcacaaacattattacttaggagaaaagagtagctgattggaagaagatattaattgagacagatacacacagagcagaaatcacaactttaaaatgcaaatggtagctgagactcaggctggggaaggagagttttatgtcctgggtcagaactggagtcaggaccaaggtctccatcatgccacctgtctctctaggagccagccatccactcctgtgggtgcttagcgtgtcctaggtcgaggtgagcagcaagaagccaggctggctggggcaggctgggcctcagctcacaggcaggctgaggaagacagatggatgcatgaataaagccaaggaatggcagagactggaggtgtggaggatttgagaagaggggacactgtcttggagtacatgggagtgggccctggaggggtattaaggtgcgatttggttaagcagattggcagtcctgagaaagggaccacacagggagggacatcaggtggtgcatgtaacttgtgacgaagactctgacttccttgagcgctagcaggcctggggacgtgcagggtgtgggagcagagtggcaggtgggagattttggggcagaggccacctcatgtgagtcctctgttagtctgctcatgctgccatgacaaaataccacagactgggtggcttaagcagcagatactcattttgttacagttttgaaggccagatatccaagagtggggtgccggtttctcccgtggcctcttcgtgacaatcactgtgctcacatggtctttcctctgcatgtgcacatccctgggatctctgtgtgtgtcctaatcttctcttcttctaaggagaccaggcgaattggattagggtacaccctagcagcatgttttaacttaattacctctttaaagatcttatctccaaacacggttatattctgaagtcctgggagttgggacttccacatatgaactttggggagacacatttcagttcataatataagcctctgtcatccccatagttttcaatgagtaccagagaatgacaggccgggacattgagaagagcatctgccgggagatgtccggggacctggaggagggcatgctggccgtgggtaagtgtctcaggtttgccgcccacctgccaggggctaacgtgtatcgtgagtgttcaggctgctcgcctgtcctccagctgatgggtgacaccgtgaagggaccacaggatccaagatcgctcagcccagagtgtccagatgctgggaagtcatgctgcttcccggttccctgtgcagttgaacccctagctgtcctggaggtgtcttgtgtgtgtttgcggtgcagctctggagtagggaactgcagtgtgggtattagtgggagggcatccaactgcgctcccggaggagtatgactcatatcctgccacgtttcctctaaaaatacatccctgcaggcagttgtcagatgtttgtgatggaaacacgtggaaagatttttacttgcagcagcgaaacaggcccatgctgaggaaagctggcttggctccaggatggtggtgtgcctcttacattgcccatgtcctctagcagggccctcccactgtgcagagttgggtccctgccctgaggccctcacaacccctctttctactcacttgggaaaatcagtctgccccttttttcattatgctttttttggagctttctggatgggagagatggaaaatcctcatttccctgcctgtcccccatagtaggtctcatggcctgggaagcctagggagatgcacattccactcagccacggtttctccatgacggtcatggcctctccagtctgcccctcctgcctgagcagcagcacagttcctcatcaccatccacattgcttccctgtgtagctcctagccccactaagacccccgcccctctgactcttggtcctttcaccgcagtggttgccaggaaagagggtgggttggtttccaggctttgcgtgtttctgttccaaatagctggagccaagatcatgggatagttgagcctggaacagaaggaggaggagaaaagatggatgcagtgatgggtttgacatctgggcctctaagaggacacttgtagactccatgccctgcttgggctgagaattttctgcagatctggttatgccgagtttctctcttctagtgaaatgtctcaagaataccccagccttctttgcggagaggctcaacaaggccatgagggtatgtaacttccatgtgcaggttgcgatggaaccttagcctcgcctgtgcctgggaccaagggctgagggcagaaggcctggggagagctaaatctcagctgagagttccgaggacctgggtagggaggggactggagggcccagggcaggtgggaaggtgaggaggcctggtgctcatgctcttgggtggactctctttagggggcaggaacaaaggaccggaccctgattcgcatcatggtgtctcgcagcgagaccgacctcctggacatcagatcagagtataagcggatgtacggcaagtcgctgtaccacgacatctcggtacgggcctgctgcaggccaactgggctcccttttggcatctcagtcacctgtggaacctccctccttggagtggccatatgcttggcctctgtgctgtgtgtgggcatcttgattatggacctcggacttgttcatccccttgcccttaaacagattataaatttctgagggcaggtggatcatgaccttgctgtcgcccccaccttgcatcccccagcagcatcagagaacactcgggacctccccaaccttgaccgtgaccttcagcgttccgatcaccgtgtgattccttgatctgtcagtgagaactcatgtcccaaaggctctgtggagctctgctgtcactccctgacaaagcacttcctgcactcagctttatggcgtaggccacatagtaaggccgttcagagcgagggccctgggggtcacgccacttggagtccagcttttctacttgctaactgtgtgaccttgaatggctcccttaaatctccctgaaccccagctccattgtctttaagatgagaaaataatcgttccttcctgggaatgttgtgagtattgagtgaggcagtgcaggtcaagtgtctattaaacactagccacagttgtatcgctgtgtggcagagccagtctgacaaaatacattctcagctgtgtggtctaacgctcaaattctgaactcacatgagccttgcaattgcaccatggggaccacgtcctcccaccttagactcagtagcatttgatgatggtgggcatgtcatcacaggaaactcactgtgtttccttggctgtatgaatgaagctgttgttagagaattagtgattctaggctgggcacagtggctcacgcctgtaatcccagcactttgggaggctgaggcaggtggatcatttgaggtcaggagttcgagaccagcctggccaacaaggtaaaaccctgtctctactaaaaatacaaaattagctgggcttgcctgtaatcccagctaattaggtaggctgcggcaggagaattgcttgaacccgggagacagaggttgcagtgagctgggatcacgccattccacttcagtcttggtgacagagtgagacttcgtctcaaaaaaaaaaagagagttaataattcattacagagtatctcctgcatgccagcaagctatggacatctggaagaagccacatgccttgccctcaagttgcttagggtggaaggaaatgattagaaatgagccaagccgagcctgcactcttagagtaagtgtagtggcctcagacagaggagagatccctgggacctgggcagtctgagccttccactggacagtcatgtgtgaggagattgcatttcctgagcaggacactgtgttgcgttacattggtaaccccaatttaaggcagcataaatgcactgggaaaacagcaatattggttagccctgggaagtggtttttaggatgattataatttttttttgtgggtattcatttgatgtggatagctggggtgagtgctgctttccgtcttctgatgggggcctggagaaggctgaactgcattttttaaggtctgtgacgcctgctgcaggacctgcagtgggagaaaattccccagggtggggctttctccctataagggtgctcagggctgaatatcaggacccagaaggctgaaagtgactgtccctcccttaacggatgtcttccttgtttctgtggccagggagatacttcaggggattaccggaagattctgctgaagatctgtggtggcaatgactgaacagtgactggtggctcacttctgcccacctgccggcaacaccagtgccaggaaaaggccaaaagaatgtctgtttctaacaaatccacaaatagccccgagattcaccgtcctagagcttaggcctgtcttccacccctcctgacccgtatagtgtgccacaggacctgggtcggtctagaactctctcaggatgccttttctaccccatccctcacagcctcttgctgctaaaatagatgtttcatttttctgactcatgcaatcattcccctttgcctgtggctaagacttggcttcatttcgtcatgtaattgtatatttttatttggaggcatattttcttttcttacagtcattgccagacagaggcatacaagtctgtttgctgcatacacatttctggtgagggcgactgggtgggtgaagcaccgtgtcctcgctgaggagagaaagggaggcgtgcctgagaaggtagcctgtgcatctggtgagtgtgtcacgagctttgttactgccaaactcactcctttttagaaaaaacaaaaaaaaagggccagaaagtcattccttccatcttccttgcagaaaccacgagaacaaagccagttccctgtcagtgacagggcttcttgtaatttgtggtatgtgccttaaacctgaatgtctgtagccaaaacttgtttccacattaagagtcagccagctctggaatggtctggaaatgtcttcctggtaccaacttgttttcttctgcttgattctgccctgtggctcagaggtctggccttatcagccagtgaaagttcatgtaaccttacgtagagatttgtgtgcaggaaaccctgagcatacactagtttgcagggactcgtaaggacatgggaagggaggttcccgaaatccaggcaggaggcccagacacctgaaaggcaaagggatcttggttggttgcaggtgcagtgaagtccactgaaggtgtggtgcgaagaatgcagtccttcacccaggtcccaggagggaagaagggtgtgtgctaattcctggtgcccctcggcgggggccagagagaaggatggggacaacccagagagtcacaagaccagtgcctcccctcagggtgcctccaggctgaaaggggctcctggctctggtctctggggaccctgtgcccgttggttggtggtgtgagggaagagaatccataagagagtttctgagaattatggtgtcatgtccagaagctagagcttaccttgcatcaggggtctccacccactccttttccaacctcctgcgttgaggtttagaaaagagagaatcgactaggcactatggctcacgcctgtaatccaaggactttgggaagctgaggtgagaggatcacttgagctcaggagttcaagactagcctagccaacagcgagacccctgtctctactaaaaaatttggccaggcgtggtggctcacggctgtaatcccagcactttgggaggtgaggcgggcagatcacctgaggtcaggagttcgagacccagcctggccaacatggtgaaaccccatctctactaaaaatacaaaaattagccaggcatggtggcacattcctgtaatcccagctacacaggatgctgaggcaggagaatcacttgaacccaggaggcagaggttgtagtgagctgagatcacaccattgcacttcaacctgggtggacagagtgagactctgtctcaaaaaaaaaaaaaaatttacctggcattgtagtgcattccctatagtcggctactctggaggctgaggcaggaagatccttagagcccaagaaattgaggccgtagtaagctgtgattacaccactgcactccagcctggacaacagagcgagaccttgtctcaaatgagaaaaaaacaaaaagaaatgggagaatccagagagactaggctagatcaagcctgctgggtcctggcaggagccccagggagtagctcatctgcagacatttgcttgaggactaccccctaaacataaaggaagaatgacatccgaagggtgtggagcagccatgagctgagaactagcctggtctacctgagattgatggcaggtcctggtcaacacgtcagctctgcgtcagagtccatgcctcaagcccaagctgaagccccatccctgctgctctcccaagaactcctctgctagggcaggccccttgcccttgggtgccaggtgggacctgcctgatgggatggggtgcttggcatatacaacttgccatgaactcaaggtgaccctgggggcctcctgaattgtgatggggcctagaaccaatgtgctctgatgtgaccatattctgtgacattaccttgccctgtttactccaaagttcccagcctggtgcccagcaggcaatattgcacctacagacacatttactttggtttccaaagtgtttttagacatttgaatttgttgccaacatttaaacattgagagatttcatatttttaaaaatctggaattctggcttctcttgaaaactcagaaattctggcactatggggcttgcattcctgcatggctggagctgagttgcagctgcccctttaggcctgtactccttatttgctataggctccgtcttgtattacactaagcccatgtcacccatttggctcctgcaggcctttgggtttgagaccctggtctacacacttggagaccacctgttgtaaagtacatggatgtgctttggtcaaggaatagaccaaggtggatatccaggccagagtgactcagcgagtttaggtcacaggcgtatactccacttgttatataacctgcttgtgtaagttcatacttggctcaaagccactattgtttggaaaaggtataactgccctgctgacgctgtacagatgttcttgggctcggatgggcatggctccacgtggtgtgcactagcacccagagagagtgaagctattgacccctgtaagggagagtgaccatctggcagatagatagaggggagccaggacatggctcagcttgtgcccagagggagagttaagccgctgaccctgtagccagggagtgcacctgcaagcatgggggtggcaggagccacagagctggctgctgagaggagctgcagatctggagaagacagcctaggtaaaggtggacagtgtgagagctgctgatgagatagctgctgaataaaactacattttacctgcctatggcccgccaggttttctttcagctatcgcccatccacccagtcccctcgaacctcagcatgggctggaacctgaccctgggcatgacatttggcatagttgtggacctgacacctgtgtttgtcctagtcctgtttctccctgccttcctgttcctctcgctgccctcatggtcactcccaagagatccaacccatgttaagtatgggctggaggactgcatgaatgcctcatgatcttcccagaggcaaaggcacctactgccttccaaggtcagtgggaggttgggatcaacactgtttattatgcttaggacaaaaaagatagggagaaagatgtgcaaccttacaggtcatctttctgggatagaacacaatgggtcttctcctgcctcctggatatgttagtcaaggccagtccatgctacacatctagtctgacttctaaaatagaagcaccagatgaattcagccctgagagaattttcagcagctgtgggggcgctggaggaaacactattaaatagttttgcacctgagacagatagcctcactcgcctcaccctagtcctggtggcatttgtctcaggtgcaaaatttaagaaagaaaccttggagtgctcaccctgtggctgggtagatggtcctaaagtggtggttttcaagcctgagtgtgtatcaggatcatcaggggagcttgctaaagagcagttcctgcggtcagaccctcatgcattttgagcaggtgtggggactgggaaactgcatctgtaacctgctgtaatctaacgcttatctaaatactactgtgctcacacagagaacaccgcaaaagtagaggtgttcctccagagggcaggtgagcagatggcacagtctgcttggaattcagtcaggtgatgagagatgagatgaggcactcctagctttgggaagagggagctgaaagatgaacctttgcaggtgcccacggtcaaagtggtggtttaatgccatgccatgcccattttctgttggccttggcagggagttacagccctaccttaggacctggctccttatttctgctgtaggctctttcctgccctggccgagatggagtggaatgagacctagaaacatcaagctaaatacatgtcctcagaaagataaaggtttacattttcacccccatcaaatctgaaagctctctgcctgtgtttttctaagggatagggacatcattactcagtccacaacctggactcatgtagggtcccctgtcagtaaaggagtcagtcaagcccaccaggtataccaaggactcttaccctcagcccctactccttggaaagctgccccttggcctaatattggtgtttagcttgagcctgactccttctcaacactaagagctgatgaagtcctgaagcagaaagagctctgacctgagagtcaaacatccttattctgatctcagctcagcccctgatttgttgtgtgaccctggatatgtcacttcctgtctttttgactttttaaaatgaagggtagactagaggagagcttctaaaactttaatgtggtcaacgaaatggaataggaaattccacaagtctgtccttccacaaaagcagcaaataaggtggcaaaaactcaaatttatgggaactctggaaacgaattgaaagtttacagcaatcaggtgaatacctaagaataaaagctggatttagtaagagagctttgttgtgttttagcttaccctggccccatcccccactccccagcatggcagcagcatcaaaaacaatatccctcattccctgtataggttcctgtcactggaggtagcagatta

SEQ ID NO: 1480 - DNA, 423 bp, Homo sapiens
gctgagcagcctctgagcagcaagagaggaggaggcaggaaatttagggaaggttcttcctggagggtctggagccctggagatgaagagccgatccgaagctgccatgtagaagaaagcatctaacaggccagaggccccatgatgatgtcgaatgcccatcgggcacccagctgagccctgcaggtgttaactcagtcttcgtcacagcagtctaggcatacactcaccattagcccatttgtaagctgaggaaacaagcctaaggagggtgaaagccttgccccagggcacataccggtcctgctggtttcagagcgggcttttcacctctgtttcttcctgtcctcttgtggactggtatctgtgtttaccatgacccagccccatgtccctccagcctcttatcctgcttctccctgc

SEQ ID NO: 1481 - DNA, 974 bp, Homo sapiens
taatttggagctctcctaaagtgaagatggcagcctggaaagacgtttcaaggtcagtgtattagtggctcatgcctaggggaaggaataacatttggagcaaacaggagacaaattgaaaagcttcaggaggaaaggctaggaaataagattctttgggtgagaataaggactttaaagagattccacatattcctgggaatctgaaagaccatacacatgcctagggctgggcatgtgcttaaaaagacttgagagggccctatgctgtcacctctgcctgaccttcaggctccgtgcaagcaggaagtgaaggctaaggcatagttataaactgcatgggtgaaggttgaaaggtgtgtcccaacacagaacacatctgcaaatgctacgaggcattttgttgttccaagtgttcaaagaaatcttttgaatcactagctgaccactaagctaaccaaagacttagtggccacacctgacaaagaatacaaactaaaaaactaaaaatgtagttcaagaaaataacaggctgggcacagtggctcacatcggtaatcccagcactttgggaggctgaggcaggtggatcacttgaacccaggactttgagaccagcctgggcaacatggcaaaaccccatctctgcaaaaaatactaaaaatttgcagggcctggtggcacacacttatagtcccagctgcccaggaggctgaggtgggaggatcacctgaccctgggaggtccaggctgtagtgagccataatcctgccattgcactccagcctaggtgacacagtggaggaataattttatttccaaacttgccacattataaataatattcagaatgttcagttttcaacaaaaactatgaggtatgcgaagaaacaaagtatggctcatacatagaaaaaaaatctgttaatagaaactgaggaaagctcagacattggacttaacagacaagactt

SEQ ID NO: 1482 - DNA, 974 bp, Homo sapiens; identical to SEQ ID NO: 1481

SEQ ID NO: 1483 - DNA, 423 bp, Homo sapiens; identical to SEQ ID NO: 1480

SEQ ID NO: 1484 - DNA, 318 bp, Homo sapiens
gaactattgatacatgcaataacctaggtggatctcaaagtcattctgctgagtgaatgattccagttacatagcattctggaaaaggcaaaactgtggtgaccaggaacaagcatgattgccaggggttggtggtggggaaagcgtgtgactaccatggggtagtatgaggtgatttttgaggagatgaaactgttctgtgtcctcattgtggtagtggttacatgagttagtacatgtgttaaaactcatagataatacgcttccccaaggaatccatttactatacattaatttgttaaaaaaataaatgtaaaa

SEQ ID NO: 1485 - DNA, 1212 bp, Homo sapiens
ttttttttttaagtatttattgatcattcttgggtgtttctcgcagagggggatttggcagggtcacaggacaatagtggagggaaggtcagcaaataaacaagtgaacagaggtctctggttttcctaggcagaggaccctgtggccttccgcagtgtttgtgtccctgggtacttgagattagggagtggtgatgactcttaatgagcatgctgccttcaagcatctgtttaacaaagcacatcttgcaccacccttaatccatttaaccctgagtggacacagtacatgtttcagagagcacggggttgggggtaaggttatagattaacagcatcccaaggcagaagaatttttcttagtacagaacaaagtggagtctcctgtgtctacttctttctacacagacacagcaacaatctgatttctctatcttttccccacatttcccccttttctattcgacaaaaccgccatcgtcatcatgacccgttctcagtgagctgttgggtacacctcccagacggggcggctgccgggcggaggggctcctcacttctcagactgggcagctgccgggcggaggggctcctcacttctcagacggggcggccgggcagagacgctcctcacctcccagacggggtcgcggccgggcagaggcgctcctcacatcccagatggggcggcggggcagaggcgctccccacatctcagacgatgggcggctgggcagagacgctcctcacttcctagacgggatggcggccgggaagaggcgctcctcacttcccagactgggcagctgggcagaggggctcctcacatcccagacgatgggcggccaggcagagacgctcctcacttcccagaaggggtggcggccgggcagaggctgcaatctcggcactttgggaggccaaggcaggcggctgggaggtggaggttgtagcgagccgagatcacgccactgcactccagcctgggcaacattgagcattgagtgaacgagactccctctgcaatcccggcacctcgggaggccgaggctggcagatcactcgcggttaggagctggagaccagcccggccaacacagcgaaaccccgtctccaccaaaaaaatagaaaaaccagtcaggcgtggcggcgcgcgcctgcaatcccaggcacttggcaggctgaggcaggagaatcaggcagggaggttgc

SEQ ID NO: 1486 - DNA, 4685 bp, Homo sapiens
aaagagatgaaccctgccccttgcccagggccagtgccatggggaaggggcttgtggggaggggacccatgaatcctgaccactcttgaacccagaaggaggactttgggccaatttcggaggagagaagaaagtgcaacgtggggagagggaagtgaattgcagaggggagggggaaaagagagagagagagagagagagagagagagagaaagatggaggagaagaacttggattcccctgggtagatggaaactgcaaaaacccaaagcctccaaaactaaccaggtccacctaacaccccctccctcccctaagaagatggatgtcctcaaaagagaaggaacaaacctccttgggaatccacattttttgggggaatggaaaagctctgtctccctaactcaactgctttgcaaggggaaatcaagctgggagaatctttttctggccacctgtggggtaggttgtcaaaccaaacagagccaccgtgggacatcaagtggaagaacttgtttgcttgaaagtatctcagacccaaggcacctcaggtctctttgctgtgcctccactatattgtcgtgtgggtgtgtgtctgcacccacatcctcacacattgatctagatctgcctttatccactcgaattataaacagctcggcttgtccttgtcccatgtgtttgtagacacacatgcatactgtccaaagattagggttggtggtggcagtgcagcaggggagggacaaacaaccaagctatgggtgacagaggctctctcctggtgcctgcacctgcactctagtgaccctgggtgccgccagacccttctcttctacaaagaccccagcaggagtgggagggtctgcaatggcatcgccctgtcctgccttggccagaagcctggagctttggtttgaggaggtagagatatgtgtatccataggaagagatctgtcagaacaggcagctgttgagctcggggtgtcttccccaaggcatgtggctcagcagcaagaaaggcaagttgctcctgctggggccctggactctgccttagctcccacctctcagccttgttattgggtttcatgcccctggaccagccttatctcagacctgcttacctgcatgatgcctttttgggggctggggattgagtcttgctgctctgcccagccctgttctattctgcagggtccctgtgttggaattctccctggggaacctactttctgctcagtgaggctccggccagaaacctggagtccttatcctcccctctgtaagtgttttagggtctggcttttgcaggcaccctctgacctcagcagagctcctgggcctgctgcctgcacaccacatcgcctacctacaatgccaaagcctcactgtcaccctttctgccttggtttccctagctgagccacgctgcccatgcagcagagggcagaaggcttgcacttgggccaaagggcctaaggtccactggacagttgggaaaacacctgaccaccatttaaggactctaagccagaatggaaaattcaccaggactccattcttaagcctatgcgagtcccctagagagaggcattgtactgatatataaatattatataatatatacatgagacatactgacagaatctgtaagctaataaaatgtaagaaaaggttaaaaaaagaataggtaaattgacaagaagtatttattgtttttccatattgctttattgccttccttggggataaaccaattcctatccttttttatatgtgtaagtaaagcctgaagtgtagggggcctttgttcttgaagcagccagggtctccttgccctggccttggccttccctagactgtgtggggctcagcattgggaggggttgcacatgtcccagcctttggcccccttacttttcagcaagccaggggcccagcagtcagctcccaggatgtgtggggagctgtccctgactctgcaggcctgagcgagtgtgtgagcatgcggggacatgggtgtgtatggcacacataggtgcgtgtgtgtcttttgtattttttctcctccaaggagctgtgtcagtgtggacgttctgtttcagggagttggaaaggagggtgtctgcagaaggtggagagcaggggcagaggccccactggccaccccctgcttcccagagtgaaaccttgtgcctggtgaccaaagtccctccaaagtgctcttccttctgggttattcaagccaaatatctgggtttccccctctcctcattccctagcaaaccccaattatcttccaagataggagatatttcccatccccttcctttgtaaatatctcatctcccactggagagcccaggagcctattcctggcatggatgttctgtccacacttgaggctgggcggtgtatcagacccttcaagcagcctggctggggcccaggactgagtctggggtcagctttcacggtcgcttttcccttcctcaccacccaccacagcccaccttgcatgcatggccagcccctccactccagcctgagccatgtgtgcccctgcgggaggacccattcatgccagaaagctggtaactccctcccagcatccctgcggaaggagtcagtttctgagagtgtgacttttcaaggcgaatgatggggaagggttccccagtccccacagtggccccacctctgggccctgcaccagagcccttctgtgtcacggcgggctgtgcacccatgcacacacctacgcacacacaacactccgcactgcagtatattcttgccaaagatttcctttaaaagcaagcacttttactaattattattttgtaaatgtttatcttcttctgtcttctccctccctgaatctattttactgttgtttattgttgaatctgtgtgtcagccaggagagcgctgtctggccttgaacatgggctgggatgggaaagggtctgggagaagatgggcaacaaagagccagggagtcatggacatcgcagcgacgcagaccccagcaggttcagtcccggtgctgccaccagctgtccagctgggtgtctggagggaagagggcagaggagggtcatgtcccttcagctgggggaggggcccagtgagctccacgtggctttttcccaaagggagcaagagggaaggattgggcgagaaaacaatggagaggggacctgcgaaggaaaacagggaggaagtgagcggtttgatcagcctgctatcacggtgttctggctctcttatttagccaggcgcttaagggacagatacatcacatcctaagtttgggaaaggcctttgacccatgtcatctgagcgtctcctccagtagctctgaaagctgtggacaccaatggccaggattccttctcccctggtttttgaggatccctgggtcttctgagactggccaggagagggatggtggggccagtggttgtgtgaaagcaggaggggcagccctcctggacaagtgtgatccccctataaacggctctcaggaggttagtgagtaggagattctgccttgttctgatgagcctgtgcaggggctccaggggagcatgctgtccagggggcacagaagggtggtgagtgtgatcaaatctagtctcactcccactttttagtctcactcctacttttgtccaccacccctgcctcctggatcttctcccactttttttttcagctttaggacctggggagatcctgtgagtcaaggcagacacccaatcctgcccccacactcggggtcctccaagaggttggggggcagagtcccagagcagccctttaccccaggtccaggccctggaatcctgagactcgcgtttccttggccagtggtaacacaggacgtgtgtgcgcatgtgcaagtgtggatgtatgtgtgtgcgtgtgttttgctcatttctttagggaacttgggagtcggggttggaggtgctgggcaatggaacttcaaattcaatgtcgcccagcagtgaggggagtcgggaggtgaggcctgtaggccaaccaattggtggagtctcagcgatagcccaggtgagaagtggttcacccagaggggcagggtgggggcctcgggcagatctgtccctcttggcacctctgtcctcaaatgtccaaaatgttggaggacctctgttcatatcccacgcctgggctcttgccagcagtggagttactgtagagggatgtcccaagcttgttttccaatcagtgttaagctgtttgaaactctcctgtgtctgtgttttgtttgtgcgtgtgtgtgagagcacatcagtgtgtgcaggctgtgtttccccatttctctcctcccttcagacccatcattgagaacaaatgtaagaaatcccttcccaccaccctccctgcctcccaggccctctgcgggggaaacaagatcacccagcatccttccccaccccagctgtgtatttatatagatggaaatatactttatattttgtatcatcgtgcctatagccgctgccaccgtgtataaatcctggtgtatgctccttatcctggacatgaatgtattgtacactgacgcgtccccactcctgtacagctgctttgtttctttgcaatgcattgtatggctttataaatgataaagttaaagaaaactctgtgcc

SEQ ID NO: 1487 - DNA, 8985 bp, Homo sapiens
cttctcttcctgcaattgctctatcacttcttccctctcaagtcccgccctttcagctacctccaactgctgaggaaccggttgcctaaaaggagccggcaaaagcgcctacgtggagtccagaggagcggaagtagtcagatttgactgagagccgtaaagcgcggctggctctcgttttccggataacgactacagctccgactgtcagtgccggccttcctcgtgtgaggggatctgccggacccctgcaaattcaatttctttcccattccgggcccttccctatcgtcgcccccttcaccttggatcatgttcaagaagtaaggacatgctgtggcctccatcggctgctcacaaaggcggtggggtgggggtggggaagagggcgagagctaagatcctctttctctctcccccgcccctgccatcctgactccctaaggttttctatagtactatgctctcactcccaacttgaacacttctttaagctttccatccgtagtccttaattgggtttcagtccctccactcccattgttttttctccttacccctctttctcttttgccccctcccccaattctgtctccattcctagggttctaccaatcacatccgtgcactgtgatttagaggcatattctctgtagctgagaggggagccctgcgctcactgccatatgtttattagttatgaactgaataaaggaaggcttgacttcctgggtcatgggagtgaaggagtctgggtgacaggaagcaagcggcctgtcatgcctattgcctagctgccagattaaccttgccttgaaaataacgattgccccataggctattcagtgtaaggaagacaaaaattccttgggaacctactagtgggtttgccttccagatttggtagacgcaaaaagcaaagggggaacatgggcaaaggaaggtgggttttgtgcatgaaattttgagcaaaaacgaatagggatcttagaaatcattattatcatcacttaaaaaaaatctcagcagattacatagcctagcaggggccgattttctatgttatgcttgggttggtcttttgtatctcaagaattgagggttttgttttctgatctcaggttttattattggtgggagcctgtgtttcttcctgggtagaattgaataagattttccaggaaaggcatttgtgtagctaattacagattatggtgcaaagtatgtctcatattcctccccctaaccccagctaattgctgtatacttgacagtttatttcaatattgtattaagacattggttttgtgctggacagagtaaaagggagatggtatttttttttaaaagaacaatttatttcataattaagtatctaaatacttggttgggaataaatgactaattagaacagtacctttaggtattctgatacctctacttagaaatgccttttcttttcttgcaaaaattacttggcagatttgatgaaaaagaaaatgtgtccaactgcatccagttgaaaacttcagttattaagggtattaagaatcaattgatagagcaatttccaggtattgaaccatggcttaatcaaatcatgcctaagaaagatcctgtcaaaatagtccgatggtaagtctttgtttttgtctgtgtaaagctcggtatagctgaatatttaatgattagattgcactcatactaaatggaattattttcagattaactattgatagattaataatggggtagacacagaataactctaaaactccaatatttgtattttcaaagattttctatgtccctgaaaaaatgtggctttgtgtattgattgttctagtaaagagttaaatgttttagttcagagttggatttaatttatttcagtttgttgtttagagaattgttttattgaattacctaacaatggaattaataaaatgtgaaataaaattggttgtagcaggtaatatttttctttttttctctactggacttgcatgataggaaaaacaatgtaaacaatattttttggccaggatttttactgactttttaagaaagtttatcactgtatatgcgtgttttatattgtgaatttttgaaagaaaatatctaacttggtactttgtgacatttgtcttacagccatgaacatatagaaatccttacagtaaatggagaattactcttttttagacaaagagaagggcctttttatccaaccctaagattacttcacaaatgtaaggtttttttatttttattttttgaaattttactcctattgcaatattcaaatgtaaagtcttgtaagaaatatgcatttaatcagataagacactgctgggggagaaaaacagaaatatgcatttgggaatactgaaagacacaaaaagagtttagagtgacttctgataattgactcattatttattagtactaggtaataatggatgtaaaactaaaatgaatgcccatcttgtggtaaatctgaaaaatgcagattctctcatgcattccagaaagcccaagaaagatcatttattaattcattcaacaaatatttattgccgggcacggaggctcacgcctgtaatcccagcactttgggaggccaaggcgggtggatcacctgagatcaggagttcgagaccagcctggccaacatggtgaaaccccgtctctactaaacatacaaaagttagccgggcgtggtcacaggtgcctgtaatcccagctactcgggaggctgaggcaggagaatcacttcaacccgcgaggcggaggttgcagtgagcagagatcacgccattgcactctagcctggggaacaagagcgagacttagtctcaaaaaaaaaaaaaaaaaaaaaaagacaaatatttattgaacttactatgtgctaggcattcagctaggtgctgagaatacaatgggaagcaaagacattgtctctgtccttaagaaactaatagtctagtttggagaataaacaacaattagataattacgcaaatatgtatttacaaactgtgataagcattgtgagcattttcatcttttatatttgtatctatttgcctaatagagaaaagtctatatatgggaaagcattgactaagtgtccttccgtccaggtatttcctgtgatgtgtgtaaatgcatttttttttaaaattgggctctctgttacatagtttttaaaaattgatacgtcatagctgtacattgtctgctgttgtggtgcctgtatcccccaccacctatatatatttataatagttgtacatattttaggggtacatgtgatatttgatacctttatacagcgtgtaatgatcaaatcagggtaattagggtatctgtcacctcaaacgtttatctttgtgttgagaagattacaattcttctagctattttgaaatatagagtaaatcattgttaaatataatttccttattgtactctcgaatactagaacttatcgacctgtatttttataccccttaaccaacttctcctcatccccttgtagtttttttttaaattaacaggcttttattttttagagcagttttaggtttccagaaaaagtaagcagaaagaatagagttccctctccccagttcagattcccctatgaataacatcttgttttggaatgatacatttgtaacaattgaaccagcattgatacattattattaacgcaagtccttagtttacattagggtttactctttgtattctacagttttatggtttttcccaaatacatgtcaagtatctactgttaaagtatcatacagaatggttttactggcctaacatcctttgtgctccacctattcatccttcctccccccacttccccaaccccaggtaaccactgatctttttaatcgtttttttactctgcgtttttcacttaacattatatcacaaaaatttcccagggcatattaagtagtctccaaaaaccatagttttgaaattacggtttttggagaatacttgggatgctgaggcgggaagattgcatgagtccaagagttcaaggttattgtgaggtattgattgctccactgtactccagcctgggtggcagagcaagaccctgtctcaaaaaaacaaacaaaaaagattaccaatttggtaaacaaatgatagtgtttcagagttttcttttgtatctgtcagattaatttggggaaatactgttcagatcctttgcctttttctgttgagtcattagtcttattattaatatattgtatatcttttcttacagatccttttatcctgccacaccagcaggttgataaaggagccatcaaatttgtactcagtggagcaaatatcatgtgtccaggcttaacttctcctggagctaagctttaccctgctgcagtagataccattgttgtatccttcccaggctaaaactgctgaaaaatgtattcattgtgctcttatcattactgcgaaaggtgtaccatccaagagaacattagatgtacttttttgaaggttactgttactcttatctcatgcctttctggttacatttgaagttgtacaaagtaattttatttgttgctactaaattatctcatcttaggtcgtttcttagaagttaaatgagaacaagttacagaagagtctcagctgcatttcagcccagtcagggcctactgttatcagacttaggacacaatagggaattcttgattactaggggaaaggatatagatgatataattggatcagctttttggatatcaacttgccactgtaatgttcattttgacttactgacatacgttggagtgaaagctctcaaaagggaaaagaatttaggcaccaggtataggtatctcttaccaagcaacaattttgtgttaggagtgaatagtgggaaatattggcaacctccaacttttattttgaaaattaattatttgaaaagttgagtttgggggcctcagagcacgttttctcaaagagaaatgtcagagtcccagatggtccttaaagatcgattcaactcatgacatagctgaataattctgcattatttccatttctaccatgctgtttcagctattttctggattaaatagatttttgtgactattctggacaggagaacatcttctcctttatcatagctaaagtagccatttgcctcgggtatagaaaaggaatggtacttggtgggaatagggaaactacttttagagtgtgtttatcttattttagtttttgagatggagtctcgctctgtcgtccaagctggagtgcagtggcacgatcttgtctcactgcaacatctgcctcctgggttcaagcaattctcctgcctcagcccctcgagtagctgaggttacaggcacccactaccacgcccggctcatttttgtatttttagtagagacagggtttcaccatgttggtcaggctagtctcaaactcctgacctcaggtgatccacccgctttggcctcccaaagtgctgggattacaggtgtgagccaccacacctggccaggggtgtgtttaagaagaataagaaaaaaaaatgatattctctgttggggcagttatagcgaagaggtagtataagtagtatgtttatattctaggaacagcttatgttgacatgctttttgcctaataggtgctcacatatttggaacactgagtgaattgaaaatcaagggagaaaagtgaggacgggttttttgttgttgttgtttgtttttaatatttattaagtgttggtaaatttatagttctggagttaaccttaaatggaaaatttccttagtacctagtctttacttttaaaaataatttttattttgaaacagttacagatttagagaaagttgttaaagaaaatggtacagagaggtcttgtgtaccctgaatcttgactttttaaaatatgtactgcagtgtttaacattccagaaacttcatatgttaaccaagaccactctggtttttctagaaaggttgaaactgttatatcaggctcttaaagatagactgggaatttacctattattttaaaacagcctttacataaaaccaccattcaggccgggtgtggtggctcatgcctgtaatcccagcactttaggaggctgaggcgggcagatcacctgaggtcaggagttcgagacaagcctggccaacatgacgaaaccctgtctgtactaaaaatacaaaaattagctgggtggggtggcatgcgcctgtaatcccatctactagggaggttgaggcaggagaattgcttgaactcaggaggcagaagttgcagtgagctgagatcatgccactgcactccagccgggtgacaaagcaagactccatctcaaaaaaacaaacggccggctatggtggctcacgcctataatgccaccactttgggaggctgaggcaggcggatcatgaggtcaggagttcaagaccagcctggccaacatggtgaaatcccatctctactaaaaatacaaaaattagctgggtgtggtggcacacgcctgtagcaccagctactcgggaggctgaggcaggagaattgcttgaacccgggaggcagaggttgcaatgagccaagactgcgccattgcactccagcctgggcaacagagtgagactctgtctcaagaacaaacaaaaatccccactagtcagtgatcagaataattaatcagaacaattaatatttattgatttcacagtttttagtatttatgtgcaagaaattttactccttttttgtgtgacttattctggttttgttagcatggggttatagtattaacatttgacttgaaagaaaaggggttattagatttattcatttagcatttactgagtatttacagtgtacccacagactctgctaggtctctgctctcaaggagttaatggtctaggagaagacacaagaggggttccaagtggcttaactagtaacatgatcattatttgacacccttcccttgatggggaggccccaaggcattttgataaatagttttcttagctgtgttctttcaggctatcatggcagaaggaaaacagcatgctctatgtgttggagtcatgaagatgtctgcagaagacatgtaagtcttactttaggcccccttaacttttgatatatgggtaaccaacccaggaagcatcagaattacaggtgaaatttgctatcatgcataccacattacacaaatatccaagcacagaagcttcatttctgatatttcctaacacttaggaagccaatgaaacctattttgtcttcaggattgtagtctttcttaagcactgaaaagaacccatgtgccaacacagctgttttatatgtgtgtacgtggtactttaggaatcttatttagtatcatttaaattgggggaggagggaagatgttttactgctagcttcattttatttatttttatttttatttttttaagtttttttgagatggagtctcactctgttgcccaggctggagtgcagtggcgcgatcccgcctcactgcaacctctgcctcccaggttcaagcgattcttgtgcctcagccttccaagtagttgggattacaggtgtgcgccataatgtccagctaatttttgtatttttagtagagatggggtttcaccatgttggccaggccagtctcgaactcctgacctcaagtgatccacccacctcggcctcccaaagtgttgggattacaggtgtgagccactgcacctggtcattactgctagttttaaaaacagtgatatatctcaccaccacacagtatcttatatcctgacctggtaatacaagaaatgtagaatatttagagaactagtaaagatatattatcaaaacataggcagtatatttaaaaattttagaacccatttgatgaccaaattagtggtattaattttgtttcagggttaatgtagcactttgatattcccctagtcttgtgacattgttactctggttctatagacccactagttagatcactaaaatcacttttagatatgagctgccacagagtaatgtagtttaatataaacaacaatgtaattgtgatgtcaataagttctttacttgtggcttaataattaaaaaataacaatatactttgaattatatttatcacgagtaagactataaaaatgcataaaagtatgtttatgtgttttttttccttctacagtgagaaagtcaacaaaggaattggcattgaaaatatccattatttaaatgatgggctgtggcatatgaagacatataaatgagcctcagaaggaatgcacttgggctaaatatggatattgtgctgtatctgtgtttgtgtctgtgtgtgacagcatgaagataatgcctgtggttatgctgaataaattcaccagatgctaaaattctgttagcttcagaaattattttaagttttcttaaactcaagttaaaattgggtagcaaacttggacattaaaaggtatctggtaagtaagcaaactcatacaactaatgtcctttcttaggctaatgatataagagtgaagagcaggacttggtcaatggattgccattttatggtagacctctagagaaactgtctagttaaatggggctagaaactagactaggaattttattctattactccaggggacccagcagtgctcattctcgtgtgtgtgtgtgtgtgtgtgtgtgtatgtgtgtgtgtgtgtgtgtgtgtgttttgttgattgtttttttaaaaaaaacttcaatggaaaattctaaacatattaagaagtctggagaatagtataatggacctctccatatccatcacccagtttcagtttatggtcagtcttatttcatctatacctcaattatttctccccaccccccaattattttgaagcaaatcccagacatcctatcatttc

SEQ ID NO: 1488 - DNA, 478 bp, Homo sapiens
ctcgaggccaggagttcaagatcagtctgggcaacttagtgagaccctgcctgtctctacaaaaaattaaaattcgccaggtgtggtagtgcatgcctgtagtaccaactactccggaggctgaggcgggagggtcacttgagcctgggaagttgcaactccaatgaaccgtgatcatgccactgcactccagcctaggtgacagagtgagatgctgtctctaaaacaaaaaacaaagtgaaactcttgattggcataattttgtttctctatcagctttatttttaaaaaaattacataagtaaaacatgtctctttagctattatctcttaaatcagattaccttctgtaataattctatgggaattattctacgggagcacagtcattcacgcttgtaaccccagcactttgggatgccaaggtgggaggactgcttgagcccaggactttgcaaccagcctgagcaacatagac

SEQ ID NO: 1489 - DNA, 5820 bp, Homo sapiens
  misc_feature (123)..(124): n equals a,t,g, or c
  misc_feature (1476)..(1476): n equals a,t,g, or c
gattcaggaaaatggctcccttatcaccatcctggtcattgctggtgtcttctggatccaccggcttatcaagttcatctataacatttgctgctactgggagatccactccttctacctgcnnactctgcgcatccctatggtaagactgggaagttgggcagttagcccatagtctaagacgtattgggaggtgtgggtgtattcctgggcatcagttatccttatctgtcattgacaaatcaggaactgtctcttaagctcacaacccctgaatctcacttctaatatagggcaaaggggtcgaggcaacaaccccaccttccgtaccttgtctcttccccaccccaccccgcagtctgcccttccgtattgcacgtggcaagaagtgcaggcccggatcgtgcagacgcagaaggagcaccagatctgcatccacaaacgtgagctgacagaactggacatctaccaccgcatcctccgtttccagaactacatggtggcactggttaacaaatccctcctgcctctgcgcttccgcctgcctggcctcggggaagctgtcttcttcacccgtggtctcaagtacaactttgagctgatcctcttctggggacctggctctctgtttctcaatgaatggagcctcaaggccgagtacaaacgtggggggcaacggctagagctggcccagcgcctcagcaaccgcatcctgtggattggcatcgctaacttcctgctgtgccccctcatcctcatatggcaaatcctctatgccttcttcagctatgctgaggtgctgaagcgggagcgggggccctgggagcacgctgctggtcactctatggccgctgctacctccgccacttcaacgagctggagcacgagctgcagtcccgcctcaaccgtggctacaagcccgcctccaagtacatgaattgcttcttgtcacctcttttgacactgctggccaagaatggagccttcttcgctggctccatcctggctgtgcttattgccctcaccatttatgacgaagatgtgttggctgtggaacatgtgctgaccaccgtcacactcctgggggtcaccgtgaccgtgtgcaggtgggccaggccacaggcgggagcaagccggctagcattcctgggaaaggcatacatctcaccatgatcctgatcccactaggtcctttatcccggaccagcacatggtgttctgccctgagcatgctgccgcgtgatcctcgctcacatccactacatgcctgaccactggcagggtaatgcccaccgctcgcagactccgggacgagtttgcccagctcttccagtacaaggcagtgagtggagttggagttagggcctgctagagactggctggtagctcggtggtgagggctgggctccctcctgctcgcttgtgaccttgtcccgcccttttaggtgttcattttggaagagttgctgagccccnattgtcacacccctcatcctcatcttctgcctgcgcccacgggccctggagattatagacttcttccgaaacttcaccgtggaggtcgttggtgtgggagatacctgctcctttgctcagatggatgttcgccagcatggtcatccccaggtactgggagaggagggagccaggtggcctgggatgatgctggaacatacagtgtctttgggaaaaccgcaaaaagacacctctcctgagtcacacaaaggcagtcctataccaggggcacactgcttgggagcctgggctggatttcagccctaattcgcacccttggccaagctcccttaagaaaggcacaacacggccaggcgcggtggctcacgtctgtaatcccagcactttgggaggccaaggcgggtggatcacgaggtcaggagatcgagaccatcctggctaacacggtgaaaccccttctctactaaaaatacaaaaaaattagccaggcgtggtagcgggcgcctgtagtcccagctactcgggaggctgaggcaggagaatggcgtgaacctgggaggcggagcttgcagtgagccgagatcacgccactgcaatccagcctgggcgacagagcgagactccatctcaaaaaaaaaaaaaaaaaaggcacaacacaagtaactggctcagcatgcagtgcagcccctcctgggtctgggggggcacagtgccctgggaaagattgacagtatactgtggtctccgttctccaagggtaaggcctccccactaacaggaaaggtgcaggaaggctcctggaagagaacagccctgcttactctgctcttccttgtgcagtggctatctgctgggcagacagaggcctcagtgtaccagcaagctgaggatggaaagacagagttgtcactcatgcactttgccatcaccaaccctggctggcagccaccacgtgagagcacagccttcctaggcttcctcaaggagcaggttcagcgggatggagcagctgctagcctcgcccaagggggtctgctccctgaaaatgccctctttacgtctatccagtccttacaatctgagtctgaggtgtgttcctggtgactgggagatgatgggcagagtggacttcaggagctgggagttgagggaccgggcatggggtggaaggcttcctgctgtctcttcagtatgtgccactggggcctgagatacagaatactagggaccccagagacctttctcttgcctcaagaattctacctacccgtttcgttcatagcccctgagccttatcgcaaatgtggtagctggctcatctgccgggccctccactgcccagagacctgcagggctccaggcacagggctgaagtcgcctctgccctgcgctccttctccccgctgcaacccgggcaggcgccacaggccgggctcacagcaccatgacaggctctgggtgagtaaatcggggccaagatgggagggcacggcagccctcagcagcttgtgtgggtctcagagaagttcacagctgctgtctgtctctgttgggagagacagggtggatgccaggacagccagctccgggagcagcgtgtgggaaggacagctgcagagcctggtgctgtcagaatatgcatccacagagatgagcctgcatgccctctatatgcaccaggtgagtgcacagctaaaaaagagagtagagggtttagatgcggagaagcaagaccggggttccaaacccttctctgccatttacttgttctgccacctccactcccatatctaccttcttaatatcctttttagctaagcctgctctcatccagggccttcacacactcgcagtttcccctgcctagaatccagttccctgggatatccagatggcctcctccttcttcttgggtctctgcagctgccgtttccctgagactttctctgatcactctcagtaaaaggctcccttgcccaccctcctgaatcttcctgtcttagttttctccatagcatttagcaccatgtgacatatcatgttttttccttatttatttgcttattccatatctcctctaccagtatataagcctcacaagggctggcatttctgtctgttttgttcactgctatctccccacacctaaaagagtgcctggcacttagaccgtcagtcagtttgttcctgaatcaaatgaataggtaaaatgagggccattacaacacaggcttcttccggggatctgctgtgaatgtaacctgtaaagatcagaggtatattacacactattaacataataggtgctctgaggcaaggattctcagggaaggggtaaagcgggaactgactgataccaggttggagggcagctgtttcagatggacatccgtctgtcccccactaacgagccccccatttctccagctccacaagcagcaggcccaggctgaacctgagcggcatgtatggcaccgccgggagagtgatgagagtggagaaagcgcccctgatgaagggggagagggcgcccgggccccccagtctatccctcgctctgctagctatccctgtgcagcaccccggcctggagctcctgagaccactgccctgcatgggggcttccagaggcgctacggtggcatcacaggtatccagtgggggtataggaggaaacagaggctgcagggaagggtggttcttccagggcctctcaaggggaggaaagaggtctgagagaacaggcccaaagactcaccccccaagcagccccccagccctgttcctcattcttgtgttccttctatgagtatgcttactcttacttgtctctccagatcctgcacagtgcccaggttccctctcatttctctcggctgcctcttggagggtgggcagaagatgggcagtcggcatcaaggcaccctgagcccgtgcccgaagagggctcggaggatgagctaccccctcaggtgcacaaggtaagcgcccggggcctaggaaaaactgccagaaatagtaacttccagggtgaggtaacagcttttcaggggaaggaagatatgccccacccccacacagagatactgtaccctcccttccaaaacacactaccccttcttttctcaactgctctgcagggcttggtttttccttaccttacctccccaggaatcaacctttcctgtccctttacctctaggtttctatggggctagcaggtatcaaccagaagctgaagactatctccattaccaaccctttctccccacaggtatagacaaggctgagcagggttcctgtggcccaggatggaggccaccgctgccctgccatcccgtctgcctgccatgggacggctcctctgagtgttccctggccccacgtgtgtggtgtttgtgtgtctgtgcctggccaagggaggtgccaacactgggcttgccacagccccaggagaggaatttggggcctaggaaccgagggcacacgggactctagcctcatccccaggacccccttggctcagagtgtggtgctagaaactggcccccagcccagccccagtactgccacctttacacctacccctgcaagtccccagaggctgcccacgatagaagctgccaagcagggagaacctgtgccaactgtggagtggggaggttgggcctggaccctcaacccctgcaaccttccctagccccctcaatagatgagcaggtcaggctgtggccattacctcacccgcagttctcgcccagtgctgcagccggctcacctctctccgcttcttgcacatcactggcctgtgtgtgctgcttgctcctgttctgttcgcttgctcacgttccgttcggcttttgctttgcgttagggtgaagacctagcgtccagctcccctcaacgctatattttgacactaaaaaagaaggtttctaaattgtaggagcaggatggaaatactttgctgcccttgccatcttttaggatgggcccccaggagactgaggtcttcctgggccctcattgctgcttatcgtaccccccatcacctgcacatgggacagaccgggctggagggtgaccttggctgtgtgcgtcccagcaaaagagctctggcgcgcatctcgctgtgccctgaagggggatggatgacgagtccggtccgaggctttgggctgctgcactgcatgctgggactgctcctactctctgtcccacccctcacccagctgtggtccggctttgggagagtggtgaattgcgctgcccgaactcggagcggagcagggtagggaccgtgtacagcttgataacccttaataaaaagggagtttgaccaga

SEQ ID NO: 1490 - DNA, 5836 bp, Homo sapiens
gattcaggaaaatggctcccttatcaccatcctggtcattgctggtgtcttctggatccaccggcttatcaagttcatctataacatttgctgctactgggagatccactccttctacctgcacgctctgcgcatccctatggtaagactgggaagttgggcagttagcccatagtctaagacgtattgggaggtgtgggtgtattcctgggcatcagttatccttatctgtcattgacaaatcaggaactgtctcttaagctcacaacccctgaatctcacttctaatatagggcaaaggggtcgaggcaacaaccccaccttccgtaccttgtctcttccccaccccaccccgcagtctgcccttccgtattgcacgtggcaagaagtgcaggcccggatcgtgcagacgcagaaggagcaccagatctgcatccacaaacgtgagctgacagaactggacatctaccaccgcatcctccgtttccagaactacatggtggcactggttaacaaatccctcctgcctctgcgcttccgcctgcctggcctcggggaagctgtcttcttcacccgtggtctcaagtacaactttgagctgatcctcttctggggacctggctctctgtttctcaatgaatggagcctcaaggccgagtacaaacgtggggggcaacggctagagctggcccagcgcctcagcaaccgcatcctgtggattggcatcgctaacttcctgctgtgccccctcatcctcatatggcaaatcctctatgccttcttcagctatgctgaggtgctgaagcgggagccgggggccctgggagcacgctgctggtcactctatggccgctgctacctccgccacttcaacgagctggagcacgagctgcagtcccgcctcaaccgtggctacaagcccgcctccaagtacatgaattgcttcttgtcacctcttttgacactgctggccaagaatggagccttcttcgctggctccatcctggctgtgcttattgccctcaccatttatgacgaagatgtgttggctgtggaacatgtgctgaccaccgtcacactcctgggggtcaccgtgaccgtgtgcaggtgggccagggccacaggcgggagcaagccggctagcattcctgggaaaggcatacatctcaccatgatcctgatcccactaggtcctttatcccggaccagcacatggtgttctgccctgagcagctgctccgcgtgatcctcgctcacatccactacatgcctgaccactggcagggtaatgcccaccgctcgcagacccgggacgagtttgcccagctcttccagtacaaggcagtgagtggagttggagttagggcctgctagagactggctggtagctcggtggtgagggctgggctccctcctgctcgcttgtgaccttggtcccgcccttttaggtgttcattttggaagagttgctgagccccattgtcacacccctcatcctcatcttctgcctgcgcccacgggccctggagattatagacttcttccgaaacttcaccgtggaggtcgttggtgtgggagatacctgctcctttgctcagatggatgttcgccagcatggtcatccccaggtactgggagaggagggagccaggtggcctgggatgatgctggaacatacagtgtctttgggaaaaccgcaaaaagacacctctcctgagtcacacaaaggcagtcctataccaggggcacactgcttgggagcctgggctggatttcagccctaattcgcacccttggccaagctcccttaagaaaggcacaacacggccaggcgcggtggctcacgtctgtaatcccagcactttgggaggccaaggcgggtggatcacgaggtcaggagatcgagaccatcctggctaacacggtgaaaccccttctctactaaaaatacaaaaaaattagccaggcgtggtagcgggcgcctgtagtcccagctactcgggaggctgaggcaggagaatggcgtgaacctgggaggcggagcttgcagtgagccgagatcacgccactgcaatccagcctgggcgacagagcgagactccatctcaaaaaaaaaaaaaaaaaaggcacaacacaagtaactggctcagcatgcagtgcagcccctcctgggtctggggggggcaccagtgccctgggaaagattgacagtatactgtggtctccgttctccaagggtaaggcctccccactaacaggaaaggtgcaggaaggctcctggaaaagaacagccctgcttactctgctcttccttgtgcagtggctatctgctgggcagacagaggcctcagtgtaccagcaagcggagggatggaaagacagagttgtcactcatgcactttgccatcaccaaccctggctggcagccaccacgtgagagcacagccttcctaggcttcctcaaggagcaggttcagcgggatggagcagctgctagcctcgcccaagggggtctgctccctgaaaatgccctctttacgtctatccagtccttacaatctgagtctgaggtgtgttcctggtgactgggagatgatgggcagagtggacttcaggagctgggagttgagggaccgggcatggggtggaaggcttcctgctgtctcttcagtatgtgccactggggcctgagatacagaatactaggggaccccagagacctttctcttgcctcaagaattctacctacccgtttcgttcatagcccctgagccttatcgcaaatgtggtagctggctcatcctgccggggccctccactgcccagagacctgcagggctccaggcacagggctgaagtcgcctctgccctgcgctccttctccccgctgcaacccgggcaggcgcccacaggccgggctcacagcaccatgacaggctctgggtgagtaaatcggggccaagatgggagggcacggcagccctcagcagcttgtgtgggtctcagagaagttcacagctgctgtctgtctctgttgggagagacacgcccgcacgccaggacagccagctccgggagcagcgtgtgggaaggacagctgcagagcctggtgctgtcagaatatgcatccacagagatgagcctgcatgccctctatatgcaccaggtgagtgcacagctaaaaaagagagtagagggtttagatgcggagaagcaagaccggggttccaaacccttctctgccatttacttgttctgccacctccactcccatatctaccttcttaatatcctttttagctaagcctgctctcatccagggccttcacacactcgcagtttcccctgcctagaatccagttccctgggatatccagatggcctcctccttcttcttgggtctctgcagctgccgtttccctgagactttctctgatcactctcagtaaaaggctcccttgcccaccctcctgaatcttcctgtcttagttttctccatagcatttagcaccatgtgacatatcatgttttttccttatttatttgcttattccatatctcctctaccagtatataagcctcacaagggctggcatttctgtctgttttgttcactgctatctccccacacctaaaagagtgcctggcacttagaccgtcagtcagtttgttcctgaatcaaatgaataggtaaaatgagggccattacaacacaggcttcttccggggatctgctgtgaatgtaacctgtaaagatcagaggtatattacacactattaacataataggtgctctgaggcaaggattctcagggaaggggtaaagcgggaactgactgataccaggttggagggcagctgtttcagatggacatccgtctgtcccccactaacgagccccccatttctccagctccacaagcagcaggcccaggctgaacctgagcggcatgtatggcaccgccgggagagtgatgagagtggagaaagcgcccctgatgaagggggagagggcgcccgggccccccagtctatccctcgctctgctagctatccctgtgcagcaccccggcctggagctcctgagaccactgccctgcatgggggcttccagaggcgctacggtggcatcacaggtatccagtgggggtataggaggaaacagaggctgcagggaagggtggttcttccagggcctctcaaggggaggaaagaggtctgagagaacaggcccaaagactcaccccccaagcagccccccagccctgttcctcattcttgtgttccttctatgagtatgcttactcttacttgtctctccagatcctggcacagtgcccagggttccctctcatttctctcggctgcctcttggagggtgggcagaagatgggcagtcggcatcaaggcaccctgagcccgtgcccgaagagggctcggaggatgagctaccccctcaggtgcacaaggtaagggccccggggcctaggaaaaactgccagaaatagtaacttccagggtgaggtaacagcttttcaggggaaggaagatatgccccacccccacacagagatactgtaccctcccttccaaaacacactaccccttcttttctcaactgctctgcagggcttggtttttccttaccttacctccccaggaatcaacctttcctgtccctttacctctaggtttctatggggctagcaggtatcaaccagaagctgaagactatctccattaccaaccctttctccccacaggtatagacaaggctgagcagggttcctgtggcccaggatggaggccaccgctgccctgccatcccgtctgcctgccatgggacggctcctctgagtgttccctggccccacgtgtgtggtgtttgtgtgtctgtgcctggccaagggaggtgccaacactgggcttgccacagccccaggagaggaatttggggcctaggaaccgagggcacacgggactctagcctcatccccaggacccccttggctcagagtgtggtgctagaaactggcccccagcccagccccagtactgccacctttacacctacccctgcaagtccccagagggctgcccacgatagaagctgccaagcagggagaacctgtgccaactgtggagtggggaggttgggcctggaccctcaacccctgcaaccttccctagccccctcaatagatgagcaggtcaggctgtggcccttacctcacccgcagttctcgcccagtgctgcagccggctcacctctctccgcttcttgcacatcactggcctgtgtgtgctgcttgctcctgttctgttcgcttgctcccgttccgttcggcttttgctttgcgttagggtgaagaccctagcgtccagctcccctcaacgctatattttgacactaaaaaagaaggtttctaaattgtaggagcaggatggaaatactttgctgcccttgccatcttttaggatgggcccccaggagactgaggtcttcctgggccctcattgctgcttatcgtaccccccatcacctgcacatgggacagaccgggctggagggtgaccttggctgtgtgcgtcccagcaaaagagctctggcccgcatctcgctgtgccctgaagggggatgaagggcgatgcctcgcccgaggctttgggctgctgcactgcatgctgggactgctcctactctctgtcccacccctcacccagctgtggtccggctttgggagagtggtgaattgcgctgcccgaactcggagcggagcagggtagggaccgtgtacagcttgataacccttaataaaaagggagtttgaccaga

SEQ ID NO: 1491 - DNA, 6487 bp, Homo sapiens
gttggcaggagggtcccggcccagagccagcggggccgtgctgagacggcgtacgtgccctgcgtgagtgcgtggcggcgcgcgtgcgctaggggagtgggcggtgaggcctggtccacgtgctccttcccgggacccccgcagcttgggcccagcggctacgtgagcaaggcacccggatgtccgcgccgctctccgagtgaccagtcccggcctccggtcccgcagtgcccgcagcctcggccggcgtccacgcattgccatggtgactgtgggcaactactgcgaggccgaaggggcccgtgggtccggcctggatgcaggatggcctgagtccctgcttcttcttcacgctcgtgccctcgacgcggatggctctggggactctggccttggtgctggctcttccctgcagacgccgggagcggccgctggctgctgattcgctgtcttggggggccggccctcgcatctctccctacgtgctgcagctgcttctggccacacttcaggcggcgctgcccctggccggcctggctggctgggtggcactgccgggggcgcccactgccaagctatctacttctggcctccgtgctggagagtctggccggcgcctgtgcgctgtggctgcttgtcgtggagcggagccaggcacggcagcgtctggcaatgggcatctggatcaagttcaggcacagccctggtctcctgctcctctggactgtggcgtttgcagctgagaacttggccctggtgtcttggaacagcccacagtggtggtgggcaagggcagacttgggccagcaggtgagggactctgtgggaagggggaagcctctgctggccgggcttgggagaaagcactgcatgtccagtcacactgcttccaggctttaggatgcctctaagcaaagggagaagggaggggctgagtcctgccgggagctgatagccagctggtggggtgtgtctttgctgagtcactgtggttttgcttttttttttttttttaagcctgtaagtgctgaatgtgttcatgacaccagtccccggccctattataagtagtaatacaatgaaattttatcctcaatgatactctctccacttatatttcattctaggttcagtttagcctgtgggtgctgcggtatgtggtctctggagggctgtttgtcctgggtctctgggcccctggacttcgtccccagtcctatacattgcaggttcatgaagaggaccaagatgtggaaaggagccaggtacacctcagtttctttttttttttggagacggagtcttgctctgtcaccaggctggagtgcagtggcgtgatctcagctcactgcaacctccacctcccgggttcaagcgattctcctgcctcagcctcctgagtagctgggactacaggtgcatgacaccacacccagctaagttttgtatttttagtagagacagggtttcacagcattggccaggatggtctcgatctcttgacctcgtgatccgcctgcctcagcctcccaaagtgctaggattacaggcgtgagccactgcgcctggcctctttttgtttttaagacggaatcttgctccgtcacccaggctggagtgtagtggcgcgatctcagctcactgcaccctctgcctcctgggttcaaacaattctcgtgcctcagcctcccaagtagctgggattacaggtgtgtacccggctaatttttgtatttttagtggagatggggtttcaccatgttggccaggctagtcttgaactcctgacctcaggtgacccacctgcctcggactcccaaagtgctgggattacaggcatgagccactgcaccagaccccacctcagtttctgaatcctggagtctcttcatttcattccctgtcatcattccttcccccaaaatgaaatgcttcttttccaaatctcagtttgcaacttagtttttctgaccccatcaaggatcacttgtgggtctgagatacctgggagctgtaaccccataggtttttccctgaagggtttctggctagtgcacttacttgatttctgagctcccttcctacgtgtttcaccatcctaggttcggtcagcagcccaacagtctacctggcgagattttggcaggaagctccgcctcctgagtggctacctgtggcctcgagggagtccagctctgcagctggtggtgctcatctgcctggggctcatgggtttggaacgggcactcaatgtgttggtgcctatattctataggaacattggtgagcaggaggagcaccagctcagtgtgctggtccttcatcagcctggtggctgggatggtccttacctagggaggtgggacagagctgggtggtcagaaagagactgtggctggtacctggggccattttgcctgaagagagtcctgggcgccataagtgggttctgactcgtttcctccacagtgaacttgctgactgagaaggcaccttggaactctctggcctggactgttaccagttacgtcttcctcaagttcctccaggggggtggcactggcagtacaggtatgagagactccgccctcaccctgctaggtataggtccctcccacaggcattccctcagcatccgcctctcccagcattcctccccagcccccatgtactctcagacctttcacatcctggtgctgggctgacgtccctcagctcccaggccctactgaggcgtcccccggctccctgcaggcttcgtgagcaacctgcgcaccttcctgtggatccgggtgcagcagttcacgtctcggcgggtggagctgctcatcttctcccacctgcacgagctctcactgcgctggcacctggggcgccgcacaggggaggtgctgcggatcgcgatcggggcacatccagtgtcacagggctgctcaggtgccgccccagtggaaagggcatgtgggagggtggagccggagaagcagggataggggcccgtgggaggaagagaacagaccccgcctgagaagctgccgctcccaccttggtgttttttaaagtataggattattgtatacatgctctcctaataacttaggtaatgcgggcagagggcaaatctctttcgagctgcacttactttttcagagcttcccactctgtttagtatgttgggttctgctctttttttgagacagggtcacgctctgtcacccaggctggagtacagtggcataatctctgcggcactgcaacgctctgctcccgggttcaagcaattctcctgcctcagcctcctgagtagctgggattacagatgtgcaccagcatgcctggctaattattagattttttgtagaaacagggtttcaccatgttggccaggctggcctggaactcctagcatcatgtgatctgcccacctagcattccaaagtgctgggattacagttgtgagccattgtgcccagctgggttctgcttttttgcatttttacatacatattatatatgcagactcacagaactaatatggcattgtggaggtttttcctaaaacaaatggtattgtgacatagccatcattctcagagttgcttattaacagaacattatggagatatatttttcttccatgcctgaaggtctccctcattcattgtaattgatacagagaattctgtagtttgagcatggttgatttagccacccacctcttgagggtagaattaattaagactggttccagtctgttgcttgaaaataaaacactaccctgaaatgcctagaggcagggttgctgggtctaagcccccagacctttcttattcacttgacctgccctcctagctacctggtgttcaatgtcatccccacgctggccgacatcatcattggcatcatctacttcagcatgttcttcaacgcctggtttggcctcattgtgttcctgtgcatgagtctttacctcagtgagtgctgctgggagacaccgtctccctgaactatccagggactcccttggccatgagctgtgcccccactcaagtgacccacctatgggaggctgtggattggtggacttgaatgggctcctagtgctcgtcatgtgatgggcgggtctcttctgtcaaatcaaaccttaacctagctgaggggctggggaaggacattcttgtcacgttaagtctgagccgtggacacaggtcaaggaagcctcgtttgtgtaacaagatgcagcttgctttcatttaccaaaagcgttttctacacatgagactttgtgcaggctgcagaggtgcctccctgtggaatctgggtgtccgggcttgagcataggcttagtgtgtacatggcaggtagtggacattgacatttggtctctgcttttggggatgatgtcctattctgctccccatcctgtcactctccagccctgaccattgtggtcactgagtggagaaccaagtttcgtcgtgctatgaacacacaggagaacgctacccgggcacgagcagtggactctctgctaaacttcgagacggtaacagagggcccggtggcagtggtgtgaggcgtggagatgtggaggagtgtaaccaggaccactggggctgacagagagctgggggtgtgatgtttgtgtgtgatgtttgaactcaggaaggaggattgagagttggggggaatgacccgagtgccatgtgctgtgcccatgccaaataaatttggtttgaattcatcaggtgaagtattacaacgccgagagttacgaagtggaacgctatcgagaggccatcatcaaatatcaggtgaggatgctagtttgaggcctccggagaataatgccctggcctggtagaattttcagggccaagagtgatagtcgagtgttggggtagaaggggcctgggcccaggtttggactcactgatggccattgtgtataggacattcctcttcctgtgttattgccctcagggtttggagtggaagtcgagcgcttcactggttttactaaatcagacccagaacctggtgattgggctcgggctcctcgccggctccctgctttgcgcatactttgtcactgagcagaagctacaggtgaggcaggatcttggatgagagagtggggcacaaggaaaagggggcctgaggcctgtgtctggtcaccaggctcttcggtaggaagtgggcagggtgacacaagaagagcggcctgcaggccccccgtgacatgctctgcttccttgattgccacaggttggggactatgtgctctttggcacctacattatccagctgtacatgcccctcaattggtttggcacctactacaggtaatctgagccctggccctcacctgtccagggcacattattatttcctggctactcagagaagtcctaaccagcacctttttgcaggatgatccagaccaacttcattgacatggagaacatgtttgacttgctgaaagaggagacagaagtgagcgaagggagaggagtagggtttggggagggaggagctgtgtggtgtttctcgtgcttggaaaacacaaagctgagaacctcagcacacatgggtggtgcccttccaggtgaaggaccttcctggagcagggccccttcgctttcagaagggccgtattgagtttgagaacgtgcacttcagctatgccgatgggtgaggccttccttttgcttcctttgcttttccgttcatttgcacactgccttcctgcttctcagtgctctgaatccctgcttttggaaaagagcctgggcaggggaggggcagggcctactagcagctctggtgatggaaggtgcctgctgagcaaccccacctttccttgcaggcgggagactctgcaggacgtgtctttcactgtgatgcctggacagacacttgccctggtgagaggagacccagccacttggcccagatgcctcaagcttccctcattcagtgcccatggtagcttgtgacccaggctgtggagtcagagagcccagtcacgataggcaaccggattgaatggtgcagcctccatggacactggtgacctcttggagagggaacctcaaaagccagtgggcctcggccggctgcggtggcacatgcctgtaatcccagcactttgggaggcttaggtggccagatcacctaaggttaggagttcaagaccagcctgaccaacatggtgaaaccctatctctactaaaaatacaaaaattagccgggcatggtggcgggtgcctataatcccactactagggaggctgaggcaagagaatcgcttgaacctgggaggcagaggttctagtgagctgagatcgcgccattgcactgcagcctgggtgacggagtgagattcggtctcaaaaaaaaagccagtgggcctgagatttttcccatttccaatgcaacaggtgggcccatctggggcagggaagagcacaattttgcgcctgct

SEQ ID NO: 1492 - DNA, 686 bp, Homo sapiens
gttggcaggagggtcccgggcccagagccagcggggccgtgctgagacggcgtacgtgccctgcgtgagtgcgtggcggcggcgcgtgcgctaggggagtgggcggtgaggcctggtccacgtgcgtcccttcccgggacccccgcagcttggcgcccagcggctacgtgagccaaggcacccggatgtccgcgcccctctccgagtgaccagtcccggcctccggtcccgcagtgcccgcagcctcggccggcgtccacgcattgccatggtgactgtgggcaactactgcgaggccgaagggcccgtgggtccggcctggatgcaggatggcctgagtccctgcttcttcttcacgctcgtgccctcgacgcggatggctctggggactctggccttggtgctggctcttccctgcagacgccgggagcggcccgctggtgctgattcgctgtcttggggggccggccctcgcatctctccctacgtgctgcagctgcttctggccacacttcaggcggcgctgcccctggccggcctggctggccgggtgggcactgcccggggggccccactgccaagctatctacttctggcctccgtgctggagagtctggccggcgcctgtggcctgtggctgcttgtcgtggagcggagccaggcacggcagcgtctggcaatgggca

SEQ ID NO: 1493 - DNA, 99 bp, Homo sapiens
aggccaaggtgggtggatcacttgaggtcaggagttcgagaccagcctggccaacatagtgaaaccccatctctactaaaaatacaaaaattagttggg

SEQ ID NO: 1494 - DNA, 125 bp, Homo sapiens
ggtaatcccagcactttgggaggccgaggcaggcagatcacctgaggtcaggagttcgagaccagcctggccaacatggtgaaaccccatctctaccaaaaatacaaaaattagccgggcgaggt

SEQ ID NO: 1495 - DNA, 141 bp, Homo sapiens
taatcccagcactttgggaggctgagacgggtggatcacctgaggtcaggagtttgagaccagcctggccaacatggtgaaaccccatctctactaaaaatacaaaaattagctgagcacggtggcaggtgcctgtaatcc

SEQ ID NO: 1496 - DNA, 207 bp, Homo sapiens
tctcagcactttgggaagccgaggtgggcggatcacttgaggtcaggagttcgagaccagcctggccaacatggtgaaaccccatctctactaaaaatacaaaaattagccgggcatggtggcgggtgcctgtgatcccagctacttgggaggctgagacaggagaattgcttgaacctgggaggcggaggttgcagtgagctgaga

SEQ ID NO: 1497 - DNA, 164 bp, Homo sapiens
cagcactttgggaggccgaggtgggtggatcacctgaagtcaggagttcgagaccagcctggccaacatggtgaaaccccgtctctactaaaaatacaaaaattagccaggcatggtggcaggtgcctgtaatcccagctactcaggaggctgaggcaggagaa

SEQ ID NO: 1498 - DNA, 146 bp, Homo sapiens
ccaggccgggcatggtggctcacgcctgtaatcccagcactttgggaggccgaggcgggcggatcacccgaggtcaggagttcgagaccagtctggccaacatggtgaaaccccatctctactaaaaatacaaaaattagcgaggc

SEQ ID NO: 1499 - DNA, 117 bp, Homo sapiens
atcccagcactttgggaggccgaggtgggtagatcacttgaggtcaggagttcaagaccagcctggccaacatggtgaaaccccgtctctactaaaatacaaaaaaaaaaaaaaata

SEQ ID NO: 1500 - DNA, 129 bp, Homo sapiens
ctgtaatcccagcactttgggaggccgaggtgggcagatcacttgaggtcaggaatttgagaccagcctggccaacatggtgaaaccccatctctactaaaaatacaaaaaattagctgggcttggtgg

SEQ ID NO: 1501 - DNA, 165 bp, Homo sapiens
cccagcactttgggaggccgaggcgggcggattacttgaggtcaggagttcgagaccagcctggccaacatggtgaaaccccgtctctactaaaaatacaaaaaaattagccaggtgtgatggcacacgcctgtaatcccagctactcgggaggctgaggcagga

SEQ ID NO: 1502 - DNA, 145 bp, Homo sapiens
tcccagcaatttgggaggccaaggcgggtggatcacttgagttcaggagttcgagaccagcctggccaatatggtgaaaccccatctctactaaaaatacaaaaattagctgggcatggtggtgcgtgcctgtaatcccagctac

SEQ ID NO: 1503 - DNA, 7000 bp, Homo sapiens
cggcccctcgtggtggcgccagatactcgcgctcctgcctgccagaccccgaggcccgcagcctccgcggatccgggcccgctcggcccctcccatggtgagccccccgccctttttccagagccttccacggccccgcccccccagcccctatcccgggctcacgcctttgtccgcagcccccgccgctccggggtgtcccctgtggcccgaagggtggtcccgcccggggccgggttcccccgtggagcacccggtggttcgcgccgcgctctcccctttgttgcgcgttcgggccggggtggggggttgggggacgggggcggggcgggctcatattactgctgactccgcggcccgatttaaacgcgggttgggggcggcagacaggcagccggcacgctcgcttgtttttcctattggagagttgctcgctctccgggcaggaaacctggaaatgggggcggggttgggggacagcggcgagggaggggcccgcgctttgtaccagcgcccccagatgtcgcacccgtgggcgttctccctggcggccgctccgtgcccgtggagtgcgcacctagaatacgcgcccgccccacatgtgggatgctttgatggactgccgtgagcccagaccttaaacgtaaacattcagcttcgcaggtactttgggctgcacacgcttctccggacccaaaagatgcacatgcttttcagaaaccgtaagtttacctggggctgtaaaaccgcacatcgcgactttgcaccgtgcacacgcttgccccgatgtgagatttcccctgggttcgcgctcgggtccgcttcttaaatacactgcctcagcggtgtggatggcacagagctgtggcagccctactgaaaccttaaacaggcttcctggggtcataaacatggataccgagacttagatcacctcccacaacttaaacgtaccccttcactccactgccttcgccccttcctgcagcattcgcatctagttgttcaaaagtgctttccgggtcctcagacatgcaccccaaggttttaaacctcagtgcaagtactagatgggcttccctgtgcaatagggatgtcaggcgcgcagttttgcacacgattgccaagatgtgagatttactttaggttgcaccttaaccgtcgtttttaaatatgatcgtcccatcttgatgtgctgctcctgctgtggaaggtatccctgggttttaggcaagcatatgtgttctttactatggctccagatcccagcatatttgaagtcctgagtcaacctgctctcctagacaagcagacattaagtatgtcgcttgggctcttaagtgcgttctcctgacttttacccatctttgtggcagtaaatgcatacgtgtcactgtatatgcggactagatacctcaggtcccagcgccataaacaacttgtatgttgtaagtgtaccctcatctcgaaagtcacctccagctgtgcgttttaactcatctcagatgctggatgtccggtatggtgcctgaagcccccggggcaacatccactctctgtccaactcattctaacgccaagatactcaggttttctatctgatcttctgacgactgcccaaaagtcagaatcacctgcgtgggtgaagaatcacctgcgtgggtggagaatcacctgcgtgggtggagagcaagtttgttcaggtttttctctttttaagcactcacaaaataaaattttttgtgtttgctagtattctggaaggaaagatctccttgtgcttcatagaaaatttggaaaatacctgtttgtaataagataaaaataaatcacccttataatttgttttcccccgcctggaggcgcctattacggggaaactctcgtgggtttcctgctgccaggctgtttgcggagctttcccttgtttgctttgagatgtttttggttttaaaaaacaataagtgaggtcaggcttggtggccctcgtctgtaatcccagcactttgggaggccgaggcgggcggatcacttgaggtcaggagttcgagaccagtctggccaacatggtgaaaccccatctctactaaaaaaaaaaaaaaaaaaaaaattagccgggcatgatggcgcggcttgcagtgagcgaggttgcagtgagctgagatcgcaccactgcactccagtctgggaaatgagtgaaactctgtctcaaaaaaaaaatagtaataaaaatagtggggagagtgcctgtgagtagcatttgtggcgttgcttggctttattgctagaactttctcttggtgttctacatgttttggtctgtgagacccctctgggggtgggtgtcccagctgtcttccaaatgtttcccccttttcctcgctgtctttctcctggatggtttagtcccctctgtgtttcttgtcatctccttcctgcctccccccggggtcagacttataaggccagagaggtgggcactggctgagccagaggaaggaattgaactttgggatgacagggagctttaggagagtttcagcctgggaaagacagggcaagctggtgtgtgggacagacacagcgcaacgcggcttgtgcctgtggaggctgcaaggaagccctggcccagctgggcacggggaaagccccctacagctggcttctaacttgggtctcaagaatcgatcaggcgcacagctggggcaaaggctggaggtggggctggctgaaggcttcaggactctgctgggccagtgtcaaggtgacagcaggctctgggaaggaagggtcctgagggtgggcagcgggaaaggacatgaggaccagcgtgtgggggtcctgaggggtgagcagagggtttggacatggccccgtgggcttccagcaggggatttggggctgaatattgggacgtcccctctggggtgtgtggggactgcctgtccttgcaggccccggcctcagttttcccacctatcccccactccattgcaggaaggtgctcgggtcttcggggcactgggtcccatcggtccctcctcagcctgggctcaccctcgggggtctggccgtgagcgagcaccggctcagcaacaagctgctggcttggagcggcgtcctcgagtggcaggaggtgagtctctgtggggctgcggctggcctccagggtcttgtcttgtccctgcggggacaggccagggcatctaggctgtgcacagtgacgcccctcctgcccccacagaagcgcagaccctactctgactccactgcaaagctgaagcggaccctgccctgccaagcctacgtgaaccaaggcgagaacctgtgagtgccggggcgtggcagccagggcggtggcaggggcagtggctgtggccgtggggatcagggcagccctttctgaccagctccttcccatagggagaccgaccagtggccgcagaagctgatcatgcagctgatccctcagcagctgctggtgagacccgcccctcccaccccacccactctgagcacccccatgcctggctgacccagctgtctgtcctgtcgcccccagaccaccctgggccccctgttccggaactcccagttggcacagttccacttcaccaacagagactgcgactcgctcaaggggctctgccgcatcatgggcaacggcttcgtgagtggggcgggctcccttgtagcactgtggtgacaagtacagctggaggcagcgctctgctcacacagtccaggcgggggtcggggggtctcccctggggccgagggtagccctcgtggcctctcggaccccatctggaaatgactgactccaggcaccctccgtagagcacagggtgaaggaactcagcctgagaggcctccagtttctgcatctgtgcccagcttcgaggtggccctgggggcgtgagtgcagggagggactggggccagccctgttggggcccaggagcctgtcggggacacatagcgtatggcagggacctggtaaatgggtgtgctaggcacaagagccagccaggagggagtggcacgttggggcttggtattctggtctgtaaaatgggctaacctccccgagtggcctgagctggccgtgagggagcagagctgagggtgctgaagcaggcgcggtgagtaggtcctcaggcctggcttcaaggggacccaggtatccagccagtggctgtgcagggactgagtggggcaggcgcggccatgacctggacccggggggctgccaagggatctgagagcggcttccgcagcactccagggttgggctggttgaggggtagagatgacattttctgaggtagggaggacaggggagccgtgcttcctagggccaccgggaggctggagggagggaatttgtgtaaagcgcttgagatggtgactttagtacctagtgagtgctgggtgaacccactggtgaggctgttcaggtgactgagattctggcgcagggcaggtcagaaagggggcttgggctgtgaaagatggcaggtgctggagaggaggcaggggtggggtgggagcgagttgtctgcccagaggacctggctctgggacattcccagtccctgttccctgttgggacagtctgcctctacccgtcccagctgccgttgagcgccctgggttccgctaggcctcccttctccctcaggagaccaggggcagaccagggcttgtgctggcatgaggtctcttaagtgacccgttcccccttcacccagcaccgtttgttgagggctgcatatctgggccccgagtacccagtctgtagggaaagtggacatccatactcaccccccaggcatggcctgggaggctgactgtgcatggctccagggaggccagggacagggccctgagcgggtgatccctgggctggacaccaaggttgagaagttaggccggcagcgtggaggggacagcactgtgggggtggccggtgtggggaggggacatggggttttgggacggtcacaccacttcatctagacaccacagccaggcacatctgtcaggcttagttctcccatgcgccatcctcaagaggcaccagcactttatctgttgagcctttatgtggcaccaactgtgtgcactattacccggttttacagatgatggaggcccagaagcaggaggtggctggtgttaggtcacacagctaggaggcagcagaacggtggggcgctgcctgtgctcttaacccccaggccaagtcaccccatcaggcagtcaggagggctggcggcagggggtgatgtgggtgggaggtagtgccttcttggcattctcaccgcagcctgggtgccgggtgccactctgacctcagccatggcagggtcgggggatgccgatgggcgctgcacgggctctcagaggcccctcacctatggccatggccttgactgtgggggcctctgtccaccgatgatctcccttcatcccctacaggtggggcggtccagggtggtgggggcacagtggccccgggcagtgaccacagggtcctgacccgcggcccccgcaggcgggctgcatgctgttcccccacatctccccctgtgaggtgcgcgtgctcatgctcctgtactcgtccaagaagaagatcttcatgggcctcatcccctacgaccagagcggcttcgtcagtgccatccggcaggtcatcaccacccgcaagcaggtgtgccagccaagcacagcccctctggggacagagggggattagaccccactgccctggttgggcagccagacttggtgtgggcggagtgtgatgcgatggctggagcaaggagctgcaggggagcccggaggatgccgggcgggttcccaccagggctccatggaaaagcggccactgggcggctctgcagggctggagggtgggtcttggcgcggcggcagggaagccagcggagcggggagctgggcaggggttgggatcgtcctgcggctggaaggccctgcctggtaaccacgtgtcctggtcatgccttgccagttgaggcagactctgcaggtcctgtgcaccaggtgagggccgggacctgtctcaggccactggggagccatggggggctgtgagcagatgaggggcagggcctgttcccctgggactagagaatggacccagctggggctaacaggccaaggctcggagggagggatggcaggccccaggacagacagacaggtttcccaggagcctgggcccctcttcccaccccgttcccttccaacaggcagtgggacctggtggtgtcaactcaggcccagtccagatcgtcaacaacaagtttctggcatggagtggtgtcatggagtggcaggaggtgagcactcggcagcccagggacttgggacccccagatcctcacggactgtggctgggaggggacactggcattgggggtctccagccctgagggctcctctttgcctctcccccaaaagcccaggcctgagcccaacagtcggtccaagaggtggctgccatcccacgtctacgtgaaccagggggagatcctgtgagtgctgggctggggggtggaggcagcatccaggggagctggggcttcctgaccctcgtccctttgtgccccacaggaggaccgagcagtggccaaggaagctgtacatgcagctcatcccgcagcagctgctggtgaggggctggggccgggtgctggagcctgcacgcagtagctcttccagagggcggggctgggggcaagagcgcctccccaggtggcctgagctggctgtgagggagcggacctgatcggtgctgaagcaggtgtggtgggtagctcctcaggcttggcttcaaggggtcccaggcagccagctggtggctgtgcagggactgagcggggcaggggcagccacgacctgcacctggggggctgccaagggatctgagagcggcttccacagcactccagggttgggcttggtgagcggt

SEQ ID NO: 1504 - DNA, 125 bp, Homo sapiens
catgcctgtaatcccaacactttgggaggccgaggcgggcagatcacgtgaggtcaggagtttgagaccagcctggccaacatggtgaaaccccatctctaataaaaatacaaaaattagccagg

SEQ ID NO: 1505 - DNA, 134 bp, Homo sapiens
ggccgaggcgggtggatcacctgaggtgaggagttcgagtccagcctggccaacatggtgaaaccccatctctactaaaaatacaaaaattagctgggcatggtggcgcatgcctgtaattccagctactcagg

SEQ ID NO: 1506 - DNA, 131 bp, Homo sapiens
agtcccagctactcgggaggctgaggcaggagaatggcttgaacccgggaggcggagcttgcagtgagccgagatggcgccactgcactccagcctgggcgacagagcgagactccatctcaaaaaacaaa

SEQ ID NO: 1507 - DNA, 755 bp, Homo sapiens
tgaagtagaacatgcatgagaaagaatgcagaaatcatgaataaacagctccagaaagggatcacgcccaactaaccagcacccgaattcagagcccaccagcccccgggatcccggccacgtccactctgaccccatgcctgcaaggatagggtctctatcgtgacttctaaccccaccaggtacttttgcctctttttagaaatggaatcatacagtctgtactcttttgtgcctggtttgttttggttaacattgcgtctgggagttttatctctgtccagggttggcgaaccccagcttacaagccaaatctggtcctttgcctgttttcatatggcctgtgagctaaggatggattttatgtttttaaatagttgcgggggggggcgggggggggaggaaagaatgatattttgtgacgcgtgaaaattatatgaaattcaaatttgtgtccacaaattgactgggcatggtggctcatgcctgtaatcccagcactttgtggggccgaggtgggtgggtcacttggggccagaagtttgctaccagcctgaccaacatggttgaaaccccatctctactaaaaggtacaaaaaaatagctgggtgtggtggttgatgcctgtaatcccagctactcaggtggctgaggcaggagaatcacttgaacccgggaggcagagattgcagctgagccaagattgtgccactgtacttcagcctggatgacagagtaacactgtatctcaaaaa

SEQ ID NO: 1508 - DNA, 554 bp, Homo sapiens
  misc_feature (20)..(21): n equals a,t,g, or c
  misc_feature (31)..(31): n equals a,t,g, or c
gcagctgcagtcaagagcgnncgcctggccntcggcctggcctaagccctgcatccatgatgaggccggggcaggtctccctcctgggtcctgatgctgtttctgtgctcggctctggcttggcctcagccctggcaccagctctggccgcaaccctgaccctggctctgggccgggcactctgccggatcccagctccaaacccctccccggctccagatccacccccagccctactcctgtggaatcttctgacccaaaggctgggcacgacgctggtcccgaccttgtgcccagcccagaccttgatcctgtgcccagcccagaccctgatcctgtgcccagccctgatcccaaccctgtgtcctgccctgacccctgttctcccactcgtggcactgtcagcccagccctccctaccggcgagagtccagagtgggtacaggagcaaggggcactgctggggcctgatggctgaaggagacgccggcatcctcgggggcctggggaagttgtgtgttgtgcagtcagtaaaatcctcccactgcctccgg

SEQ ID NO: 1509 - DNA, 205 bp, Homo sapiens
gccagggccagccacaatctggagctccagtgtcctggcttccttcttgggcccaccagctagactttccagcttaacccacagtgtctcatcctggtccatcccactagtcaccactctctgttcctctcacttaccccttgctcttcaaagcccatacagtaggtatacaagtggacaaaaaaagttgctcatttatgcaatc

SEQ ID NO: 1510 - DNA, 1274 bp, Homo sapiens
ctgaaagcttttgggtctcactggaccatcaggactgctgccgcccctctggagagagcagctttttatttgtctgtagacagggaacatgatgggcactgacctcctgtaaagaataaaactgtgggccgggcgcggtggctcacgcctggaatcccagcactttgggaagccgaggtgggcagatcataaggtcaggagattaagaccatcctggctaacacggtgaaaccccgtctctactaaaaatagaaaaaaaaactagttgggcatagtggcatgtgcctgtagtcccagctactcaggaggctgaggcaggagaatcacttgaacccgggaggtggaggttgccgtgagttgagattggaccactgctctccagcctgggcaacagagtaaaactctgtcccaaaaaaaaaaaaagaatacaaccttgcaggatgtctctcctggagacagcaagagggagaggagggagagggctctttcttagaaaagaggcctttggtgagcccagaagtttgaaaccagcctgggcaattcagcaagatcccatctctacaaaaaataaaaaaaaattagtcatggtgccacttgcctgtggtccccactgcttgggaggctgaggtgggagaattgcttaagcctgagagttggaggctcagttagccatgatcatgccactgcactccagcctgggtggccattgaattctgcgtggattgcctcagtttgccttgtcagccaacttccactggctgccttggcactgccatgacagcacagctccacaccagagctggggtttctcttcagtcctgggtaccccttggcagagggatttgctgaggaaaattaggtatccttcctagccctccacacacttccaaaccagggctgcggatctgatggatgccaggaagacagccttgggctgagagtgacgtcactgcaagagttgagagccagcgtctaaagtgtccacggcatcctgggaggttttatccttggcgactctaatggtagatttttgtccaccttgttctatttgcttttgtttgtttttgatttttctgttttaaaattttaaggagagatggggtttcaccatgttgcccaggctggtctcaaactcctgagctcaagcgatctacccaccttggcctcccaaagtgctgggattataggtgtgagccaccgcatccagcccacattgttctatctgtatttcatgaaagcagttctgaatgagagtaaatcagcttcagggtgta

SEQ ID NO: 1511 - DNA, 39567 bp, Homo sapiens
tcacctcattagtgtccacctggcactgactgatcagcacactataacatcatgagaaagatggcgggaagatccctggtaattatacatttttacttacgtagcaacaaaggagagagcgggaagctagaaggcagcaggaacgtgaacagcgaaggagagaacaagaagaaaagaggcgtctagaggagttggagagaaggcgcaaagaagaagaggagaggagacgggcagaagaagaaaagaggagagttgaaagagaacaggttagttcacagataacatagcaggcatacacttgtgaagtttgttactttgcagagctgggggatttttagaaagtatacacacatgtgatgcatacacacatgtacacacatacacatatacttagaacttcagatgtatgaacgtggtgaaacacagttggaatgacaccaataaattcagtctcttgtcttaaaaagggtttataaatcattacactttaggaacctgttgaaaccagttaagtggtctctaaatagtataatacctgaaagatgtctgcatgtatcttctcaggcttggcttaaatgctgtagaccccaaatatatgggtgataattaacttttaaaaaaaaaatgaaattaaaaaccaacagtaagaaatttcttaggagaaatatttgaatatccagtggctaagtgaatactgtaatatatatcagcatgtaattctgtatatacacagcacattaaaaaaactaacattgatgagttcaaccaaaaaagatcaggttttaataatatttgcagcattttattaatgtcaggtatgattttatttagaattatttttttgtttcctgaaccacctgtacaaatacaatttgcccttagcccctttgcctttcttgtctttgaattgatctctttgttatgagcttggaataaagaaaaaaatgatatgtgaggaccaatttaaatagcacttggtatctgtattttaaacttataaaccatggtgttaactttcaaatgtgactgttcagctgccgtcctttatgcttatcatgtgtcttgggctttctaagcttgggtctgcatgctcctcggtgttttcccaggaatttcagtgacgctttttatgttacctaattgacgttgtcaaccatttaactgtgtagcgcgtgtgctttaacattccacttatgtttatacctggggtctgcaaagaggaaaacattcaagcttttaagaattaaatcacctagaaataatgattacagttcgatcatgagaggagggtgtgatggtagcaattcatctttaatgctctagtggcagtcattaaattttgtgaatagcaagtatttggcaccacttttaaaaaaaaaaattctaaaatcggttttattctgtttttccctgttctattgtgaaatagtaattcccatgttaacagtgctgtaggacgcatttcatttcagcataagtgtgtatgtttgtgtagatgcgtgttgtgtattgtttgttcattgactatgtgttaggacctttgtggtttggagaggacatgatttttccagctgtccctgtgttgagggcagaaaacaaatgagtgtactgacttgatctttcgagttaagatttaattctgttttgttcaaaaaagaaaatgagttgaaagtcaggttcctttgctccgtcacagttgggttaaggccacaagccttgctagggtaggtattgctgtagcatgtaccatggagggtcagacatagacacaagagacgtagatcccaggtcagaaccagatatgtttgtcagtagccttctgactaagtccgccccacccctctgcccacacccccccagttggcttttttggctcagttttctttgtaaagtaaggttttctaaggatttttatatgctgtaatttcaatattctcccagagatattggttaactaaaacttctgttcagcccatattgatggctatttttgtttcaaggtgtgcaccatgacacaaggggatggtcagcagtagacactcttaaaagggaatctgaatttcaggataaaatgtctcctcgtagtccttcttagtctattcctcttctagagcttttttccctgtccaaaaaaaggaagcctctttggcttgtaaaatgttttatgcttttcaaggttatttcatatcaatctcatgtctgaaccttacaaaaattcctgagggttgggagaggagattttggatgctcatttctcaaatgaggagactgagaaaaggggagctttagagcatgctagggatcatagagccagtcctcagtggaacagggactgaggcctcctggtatccctgtcctttataatacgcatgcagctttgaagtagggttttacccctctctataacatatttgggatgtgtttacttgttttcattgttataatgactaatcattctcttctcattgaaaagaaaaaccaccccatcctcacttcctgctgtctttctctccccttgtccttgtctgtctctgtctgtcacacacacacaagctcatcatggagcctgggtctgttcatttgaggagagttgcccaagtctggaatgtagtcattccaggtgcctttggaattgttagtgaaagcatgaatcatgtttgttgtattttattattaagcaggttttggttttaggtttcaaaaattggtgatctgtgcttgttacaaataatgactaataagcagatgtttactaatcagaaccctctgatactttttaattaaaatcttgatttctctggggtttaccaaccttaagaggaatggcatactgttttaaaattctgtatttgtttacaacagctgtgttctaacagaagtactcttagatcccttcgtgtatattatgggaatgcatatcatcatttgttagactccttaggtcttactggccaatttgaagttcttggagaaatctttagcaatagattttcttcaggtatttaccactaagtgaattgtcactaaaggtgattggagcaaatggttcttggtgctccattcaggtggttctgatgcttttctttgggataatttgattgctgggtgatttctgtgtgacaggagtatatcaggcgacagctagaagaggagcagcggcacttggaagtccttcagcagcagctgctccaggagcaggccatgttactggtaaagccccgcctctgtttcattctgtagcatcagggctccttcatccgtccccaaagttgagcaagctgtggtggtcaccagaccattttggttttgctgtgggcagccaggctgaaatagtgatgcccattttgtggtcctattgctagcacattgcaacatggtctttatttatttatatctctttaataagttaattgttcttgtttggtagaccaacaaggttttgaacagaacttggcactcagtgaacacactagaatgctgagggcagtaggttgaaagcacatgtcacaggatttttacctagtatctataccactaaaactcacatttaattgaattatctcttactctgtccaatgataattatggttagcaacagctgtgagatttttccacaggtaatgtgctatttaaaatcccagccattttgctttcttacaaaacacagagggaaaatatatggtcactttttttaaaagccgaacaaatccagagaagaggcgagctctccagtgtcccatagatttagtgttatcctctccctctccaaggagtgccgatggcgggagatggaggagcaccggcaggcagagaggctccagaggcagttgcaacaagaacaagcatatctcctgtctctacagcatgaccataggaggccgcacccgcagcactcgcagcagccgccaccaccgcagcaggaaaggagcaagccaagcttccatgctcccgagcccaaagcccactacgagcctgctgaccgagcgcgagaggtatcctctttcctttgtcacttagacattgccctggaaagtcgtataacgactcttcagaactgtgtcatatgagttctagaacgggccatagagtttagctaattatctggtttcttcattttctaactaggaaattgaatttcagaggagtggagggccttgcccaaggtttcatattcagtcagtgctttttccataaaggaccagagtgcctcagttaacatatcccagaagaacttgaaactgaactaaactaaaagattacatgacacagtcactcttaaaaatgtggatgagggaaagagtggtctgatgaactattctgccaagctagtataaagctaaagtgtgcctgtggctcaactttctgactttgcagatgtcaagatgccctgctagattggtgcattagggttacccagagcctcagagtaggctgcggcagggactgctcgggggtgcaagatgggcgacaggtgtgcctccagaggtgttgaatcccggcccacaggtggcagcagccttctattgtgtctgccctcacaggcagtagattctagaaacaagtgttctgtttgttctggagtgcttttatatttggtggagtgaaatgcattccggatttctgatgatagttttttagtctgttggtttagttgcttgtgacagattaatttttttctacttcatcatcatatacagtcttagaattctgagcaaggaggagagcttagagactgccttgctaatttttatcttcataaatattttctttttcctgaatctaatcctagcactgctttatgtaccttcttttttccagctacccctctcttttctggtagcagaagaaaacagaaaacttacctttagatttcttccacttttagactttctttgatatttctgcttttcccctactaacactgagttatgtcttctaattctctgatgcaggtggaagatagatttaggaaaactaaccacagctcccctgaagcccagtctaagcagacaggcagagtattggagccaccagtgccttcccgatcagagtctttttccaatggcaactccgagtctgtgcatcccgccctgcagagaccagcggagccacaggtagcgacagccagctttgctgtggttgaggagactcatgcaacggctcgctgagccgcaggcctgctgtaatatcacagtttagtttgtcaccacactgaaaaagaggagagattagcaggagtgagtttagactaaaagaaggcatagactcagttgatagggaaatatctttttctttctttttgagatttctatgtactcattaagagtatctagagtgagtgatttcttctaactttttgccttccctaactcaggtgttaagtgcctcctttttctgatacaaagatcttttagtttagtttttagagaactgggattataaatacatagagggagagccaggaattttctttgaagtattttaaaagtaagcgctttactgtgtgagccctggctcttggccagtcctatgaatgggccttagatgatgcccctgaaattgcatgcaaaatgtctttatttgctcaaatgtgtattttttgtgggggtggggggaatgaccttttatcagattctcacagggttcaagatccaaaaaagtttagatctagtgggttaggtgtggatttctctgaaataggccagggaaaaggctgtgacctctccttgggtctgctgcagcgttctagccttggctaggtgaggggaactgttgggccgatgctgtgtggctggagcagaacccacagtgctgtccatagaggagaacaagcaacgaagatcatggctaaagatcttagagatccttaaaatgccgattcctaatctcttgctgaaaactactgacttttagatattttcccgcttgccactctgtaatccagaatattaggaacaagttcttaaactcgagtttacttttcactggtgtttgcatgtgtgggggacaaaagtttatgttcttgtggcaggaaactgtgggatctgcagcatggaggagttaaaaaaaaaaaaaaaagggctggggcacagtggcacgtgcctgaaatcccagcactttgggaggccgaggcaggcagatcacctgaggtcaggagttcgagaccagcctggccaacctggcaaaaccccatttctgctaaaaatataaaaatcagccgggtgtggtggcaggcacctgtaatcccagctactcaggaggctgaggcaggagaataacttgaacccaggagtggagtttgcagcttgcagtgagctgagatagtgctactgcatgccagcctgagtgacagagtgagactccatcttaaaaaaaaaaaaaaaaaaaaaaaaaaaaggaacagctaggactgaggccagggctgtgtgagggtgagtgggtatttccatgggaccagcagttttttgagtcccaggagagctagcagatgggtagctccagagaggagaggatagaaaggaaagaggaaagcaggagagggtaactggacacaattaaaagaggatgagaagagagactactagaataggtctgaggactcgtgttctttagcaactttgcactgcttgaagattaaaagttttcacactgcaagttaaacttcgcataaatggacaatctttggccactaatagtttagaaaataggagtttctgaattatctaatttttgcatttgttatgaatttgtgtagtaactagaaagagtctcccatttcctcctcctgttcattctttgggggagacttttctcgtgtaggactctattttaaaactcatttttgattataatttcaggtaatactttgaattacatgctttatctctgaaaatcttaaacattttagaagtctaggattataccaatatctggtattatacaaatctcacctgtatattgtagaaatcatacaatagaactaatttcacatcttgtatttggaaaggttgaacaaattgattcagtattttcagtttatgtcaagtacattgatgtaatagatatgtagctatcattttttcagttgccatattgaacaatcattttagaacagtaaaacataatttaatgaaaatattttatggattttttcagagatcattttcccaatttagaagcaaccagataaactcagttgacaagtaattgtcatatttttgtaatttcccaagtggaaggaataccccaacaatagtcaattcagggaatccatggtactgaatatttttaaagaaatcacaattctttattttcatcactaatatgaaagtatatggagatacctgggttatgggtgtttgtagacttgggaaaaataagaaaaattgttggtatatttgaaaaattagctgttcttgagatattatagtctcaaaacgtggggtttgtctttgctcgttgaacgtgccattttgttactcgctctggtgtaaaatgtgacactgcaggtaatgtgaggatggctaggtaggtttgcacatttggcagtgcgctttatcttacaatttttctgcctctctctgcctttccagtctctgctttgacatggatgtgcatgcaacacatcataacccctttgggctctgagagcctctttgtggggaaaaaaaaaataaaaatcttcacattaactgctatctgtaatgtttgtctggatattaaaaagagttttccttgtaaatgtacatttgttcttttctacatactgtgttcccagaccacttcttcactttgaagtgtaactgtttcactgcgtggctgacctaacactgtaccaccccggtgtgtattccgcctctgccagttcctgctttggatttggtattgaccagaaaagccagttttatgcagaacgcattgaatgttttgtgttttgttttcttgtaaggtacagtggtcccacctggcatctctcaagaacaatgtttcccctgtctcgcgatcccattccttcagtgacccttctcccaaatttgcacaccaccatcttcgttctcaggacccatgtccaccttcccgcagtgaggtgctcagtcagagctctgactctaagtcagaggcgcctgaccctacccaaaaggcttggtctagatcagacagtgacgaggtgcctccaagggtaaggagcagaaagacagatgtgtgctgcttttttcctttttgttatttttttttaaagattatttattttaattatgggtatgcaacttgaccaaatttaaaggggcattgaaatttcaaagggactttttactggtgaggataaagttccatagttaggcaattctgtttagccagtggtcagttagcgttttatttttgttaaccctaaataaggtagcaaaatgatgtaagagtaagtctacaaagaataggcttcttaaacaaattcataatctattttagcagttttttatatgtttatacagaagctatgcagttttgcaatattaatgtcaaaatttttagaaaaagtcctataagaaaaattttattttctttttaaatgtaggggattttgttttgtttttgtgtttacataatagtgaaattaaacaaaggagcccatgtcaatttatttttcctcatttggaatttgcttcctctgaatattttcttgcttcctgctagtctttgcttcctgctgatccatttatagaccattgtttggtttctttgagcttattttcctgattctcacattatctcagcaaatgctttgtatgtccctgctaccaagcttcagtccaaacatcatttaaatgttacaggagcatagaaagcctgtttgtactggcttcttggatgcttgtgactaaattttctctccgattgtatcagtgtaggaccagggaaggagttggggtggggagtggaggtgataggaaggactgcttttaaatattaggactgctttaaaaatatattttggtagggaagtattttttttccttttcatgttttcaataatttaattgctatattttctacttaaaggttcctgtgagaacaacatctcgctcccctgttctgtcccgtcgagattccccactgcagggcagtgggcagcagaatagccaggcaggacagagaaactccaccaggtaaaagacaagtgagcactgagaacaggccttctgtgcagtctaccacagccttacattgtctgtttcataaaaatgctcttaaacacagacgttctggggctaagagattatcagttataaaaggaaaagctgccataaaatccatcaacgtggatggcatcaagttgatgtgtagtaaaaagtgggtttgaatccggatgtgtattatagcaactctgaaatttaaactacttttctctgtaagagtaaatggagggagcagcaaggaagggggagaagttctaagagaattgtgatcggggggagcttttcatctaagggatgttgtaaggcctgtggcataaaacagaaatcacaaacaggttactaaagaagtcactggttgacttcacagtctgcagtaaacaagtgaattcaccaaatactatcctttttaggttctagagctgctctgtccagtacgattagctacagaagcttccttatatttaaattaaagtttaagtttagttaaaatgaaatacagtggaaacttcattccttagtgcactgggtatattcatgagctctatagccacatatagctagtggctatgatattatccagctcaaatatagaacattttcatcataacagaacgcttcattgaccagcactatcatagggaagaaaagatgattatgttgaatgttttatatcttgatcatcactgaacctctaaagttagccttctgcgcatggaaccttggtctgacttgaggtgtcagatggatgatagcccaaaagctgcacagaatcctcagcactgctaatggcagggggactgtggtgttcttccctgaccaagtctgtgtcattaattcttacctagcacatgtgtgctttgggtccatccatggcaggaaatccatcccagctcatgctttctgtaccgtttccaacagcccatacaaaggactattctttgtaagtgtcagtttttgagaacagtaacaggcaggtgagagcagcagcctagaaacagaatatagttttgtgtataattatacaaatacggagtgttttcctaatattaagaactgacttgtagctgtgacagaaatggtgctgcttctacactgaacagtagcattgtatctcacacctgatgattttagatctactaatggtaggatatcatttagcatacaaactaaaaatcgataaaaatccatgaacaatgtcattatatcttttggtgaatttaatgttgagtgctgtttatagactgttttttgtctccctacactttaaagacattggatgggcacaccatgcacatgttggtaatttggtgctgcatctagagatgacacattagctgttctctcttcttcttttctaacagcagtattgagcccaggcttctgtgggagagagtggagaagctggtgcccagacctggcagtggcagctcctcagggtccagcaactcaggatcccagcccgggtctcaccctgggtctcagagtggctccggggaacgcttcagagtgagatgtaagctgcctttcctttcctttttccctgctaatgttttgagctgtgatccatatcttggaagtttgtcttaatctgtagtttgcgtgtagccacacgtcacaaaacaatgttttagcataggttgctagtgacaataatagtcatcctgattttaatcataaaggagctaaattttgagagctttatatatacctagcactgtgagcgctttacaatttagtgggattaactaactttcccaaggtaattggctaatgtgtgagctaggatttgaacccatttctttcggtctgggctccagagcctatactgtcatcaatattggttattttaatgtactcataatagatgagtgaatattccctctactgtattattgacataccatgacaaggtatatattgtgaacacgtgtcaaagtgagtgtgatgatggagggtttaagtaaagagtcaggaaggctgctggagccctccttgggccccctctgctctgtaattcagacctgcaggtggagagcctaccatgagtgggcagacaggagtgggcggggtgggcagggcagcttcataatacacatccatatgttgatatgtgtctgtccatcttgtcccttttgaacccaacagcatcatccaagtctgaaggctctccatctcagcgcctggaaaatgcagtgaaaaaacctgaagataaaaaggaagttttcagacccctcaagcctgctgtaaggattgtgcaggatcagttttacttatttcagacttgaatgagatctttctattaaaaatatgtggttgagaggcctgcagtcttttctgcgagggcccctcacagatttgaggaattataaggaatgacctaaaccccagacatacttgttcccttccattggtatcgtctgctttccctgtataaagtctcaagtgagtaaaaccttttttctgttgttccagccatacacttggtgtacagtcagccttacaaaattatgcagaacaaagtatagttcttatttaatgaaatttccttctaaggaaactgatgctttaaaaaaaatacaaaagaaagaaaagcctttttatctctttcttggcattaacctttacttattcttcgtgagttcagcatttacaatactggcttttagactaagtttttaaaaatcaccttcttaaactcactggttgcctaccttctgctttttggtacctggggtgatagttgtgactgcttctcacccttctcttttaatccctctgatgttacctgaccatgtaattgtgcacgctttgtggaattttaagcctgtcagagttttcatttcctgcttgaactgatttctgtacttctccctctccccttctttctcccgcgcttccttgtactgtgcattcctcatcaacgatggcttctcggactccacgaaactgcgctgtactgaagggcgaagtggtaagcgccatctctgaaaagttccacttcagagcagcactccgaccgcctgtcagctcagcttgtattcgagctgcggtcctgctccttcctcaacttgacttcttgttcttttctagaatttaaaaacctcaaactttactccagttttcttaacataacatttgctgtatttattgttattaaatgtagcttttttgagtaactgtttaaaaagcttcagctataaccacgaaatactaatagcaagactcagagcccatcactgttatttcagtggctcaagctcaaagaaaagaaacattctcaactatgaagaaaatagaaaaccaagttggaactgctagaaattaaagacagaaagagctacatagactgcgtttttaaaaagtgattacttttacataaaattccccaaaaaagatgaatttggagttttatatgaaaatgtggagtataaatagtaatcactcttgaaaattatatttggtggattgattgagtcttagagtatctcagtgtggaagagtaaagggaaactaagccttttgaacaaattccactattgatttctttctgatgttcccttttatacgtggtgtcacagggtgatgtgggtaaggcttgaaggagggcgttagggacgcccacagcctcctgcccccagcactcagggtcgcagtgtctcttcatgtgtcacagacttgtccatgaatgtggcaggttgtgaacagtcggtgaagtgagatgtcagtggcatcctagtgctcacttcactcctttcattttaatgtaggtttgaagttttttttttttcagtatgaggtaaaattctagatcaacaaatgtatatacacagatccttgagctttggtgtaaagacacatgtctatatgacaaagtcttctttaaaggggtcagtccagaaagcaagcctctagttaaataagcctgatttaaagagttttgggagggaagttatgtttctacaacttttattaataaaatattaaacctaaaatgttgattttagtaaaatattaatatttattactaaaatttcataaatatcctataactagtaaataaaaacattaaatattaaaccttagcgctttgaagtttttaataataaaagttgaagtaaaataaaaatgtgtctctcaaaaccttttttatgagtctaaagaagactttgtcatgtagggagatctccttacaacaaagtccaagagtctgtgtatatacatttgttgatctagaattttacctcatattaaaaaacaacagtaatactatcagcttaacataagcagatcttttttttattgtcatgggatttgaactgtatatgacatctttgacttttttttggtgtcttctattttttttttttaatctctctcttgactttatttggtcttttctatcaaaagccataggagctcactttctcatgaaactgggtaactataaaagtcttacaaaactgacattgtggcaatttatggttaaagaacttctcatcttctcctgtccctgctcctgcttgccttactctctcttttctgtcctttgctttaggatctgaccgcactggccaaagagcttcgagcagtggaagatgtacggccacctcacaaagtaacggactactcctcatccagtgaggagtcggggacgacggatgaggaggacgacgatgtggagcaggaaggggctgacgagtccacctcaggaccagaggacaccagagcagcgtcagtccccggtctcttttagagcggatgagagtattctctcagagcctgctttccactgggacctagttgttcctagactattccgtgaccccatgagcacttactatgtagttctcgtggattcagcagcaggtcgccttgtgtttccccttctcttcgttggtgtgtgcatatgtcagtgcttcccccagcaccccagcgtgtactttattttttccttttgatttgaggatatatgatccaggggaaatttcagtttggtataactactttaattagccataattattcattctaagtttttgctcagaaacaaatggcactggaaagaaattctttgttaaagggagaaagctaagcagttgcttttttggaggaggctttatatcggtagcctcatctcatgttttgattttgagaaggcgaaaagcctaaacaggatctccttgactccagagattaaggcctttcacgtctggattttttctccataggtcatctctgaatttgagcaatggtgaaacggaatctgtgaaaaccatgattgtccatgatgatgtagaaagtgagccggccatgaccccatccaaggagggcactctaatcgtccgccaggtacccgtgtcttctctgttgtcagaggctgagcttctcctgtggtcattaacccacttgctcattcactcactcatgctgtttctccatcatcatctgttttcatgttaacaagtcccagagggtcaagtgtcgagtgtcgggggctagggaggcaggtgtgtactgcatgcccagaaggtagcgagtagtctccaccccacatcgctgctcctctgcatgtctgcggcagccctcattcaagcaccgcgctgagtctcacagtctatgtctgagcgggagagaagccacagggagtccttaaacaggctcacagagtgaggaagcaggtctggagtctggcagagcagccaccatggctctgcagagcacgctgggctctgagtgtctgcagtgccacagtgggagcgggtgaggcaggcaggacgagcctcatcacaggcccagagactcggagagcagaagggttcgggaggtttctcttctatgttccaaaatgttagttttctcacttgttgaataattaaatgtgtgccacccagatatgctcagtttggatcactaagctttataactgtctgttcatttcttagcttagacttaattaaagtgatacgcttctcatttaaatagaacagggcacctatttagtattttggactttgccctaagtgtgtttcatgctatggcaatgcattcggatggaaagtaggaagaatgtggaaaagaccaggattcagagaatccacaggtactttctggagctttgcaaagaaagatttaaaaagaaaaaaaaaaggatactggttttggtaacagaagctagcgcaacagataaaccagattaaacactcactgctcgagccgtgcagccaccagattaggtactttgaattctgttggcacaagttaggcatttggtgaggaagtgtgagcagttcaggctaatttctttggtttttccttggtaatttagcagagtttataagtcacacagcaccttaaagcagttatcaatagggccataggcaattttagcagcgcttgagcgagacaagtgtgcctgttttttctacagagtacagttgaccaaaagcgtgccagccatcatgagagcaatggctttgccggtcgcattcacctcttgccagatctcttacagcaaagccattcctcctccacttcctccacctcctcctccccatcctccagccagccgacacccaccatgtccccacagacaccccaggacaagctcactgctaatgaggtatgtctcgcaccacagctggctgctttcctggggttagaccagcactgcctaggagttagtttgcaaaggagacctttccaacaccctcaccccttcccttcccaccctgctttctctgtcacctacccttctccccaaccccaagtaacatgtttcagatctgcatataaaccccttaaccctagatcagctcccccaaacttgccagttcactgtttactgttctgtagataagtatagttgcatggctttatctagtttattttttaaaaatctaaataaaatgattgctctgtcctcagaccggtattatgtatttggcatgaaattcttatagtcatttgtggaatctgcctttttcattctttttatccaataaataaaatataggaagattcggttcagcaggcttggccttatctggacaaacttattatcctgtacaggaatctctttcaaacagaactgattttttttttttttcttgtttggggggtgggttgttggctgattactcttacttgttttcaccaaccctgttaaggagtttgttctttgacatttacaatcactcagaggtttagaagccaaattatttttgggaaacctagaaaaaattaggatgttaagcaagaaggacaaaggtttgagcttgtttttaatttaaaattttgtgtgggaaatctgtgtgctcctttgaaggcttggttgtggtgctcggtctgggtgttagctcagtctgggtgattctttgctctttgaacagggttatactccaggtgtagtgacatagcccacttgagcacccgtattgaattaaacaagtgatttgattccacagaagatttggtttaagtgtctttatctaccagttgagggaggttagaaagaatcagaaaaatcctctcctccggaggagcagtggcaagtcaactgcttcctagacaggcttggcatcggctagactggctcctgactcatgggacagggagggaagctgccaggggacagatgttcaggtgggaagcttaggggagggcatgggctctaggacatggtgaccctcaggtgtccatggagggggtccaatggtacaggacaaaagcacttgatcagacatgttccttttttctcctgaggtatatatcccacctacactcacattcttccttatatttatattttaaactttgctccatttcgctctaatgtgcagtattttactataacccttaactcactaaaccggcaaatttatttttctgtttgttttgtttttaattgtcattacatttccacttaacaatttgtttcacttcctttgtgtttttttgtcttaagttacattattaaccaaaacactagtgctcctaaaagatcaaaaagatacgccttcttttgtcatttgcacctttcactaatgagtcctcatttggtatgggtttaatggtgatgcacctaaaacaacagtagccaaagcttctgtagctttctggcaagaggctcaatttaaaataactacaattattaacaattgccaatattccagcatagattatttggactcttgggtaggagaataaattcagaagttggtgaattgagatcaagacatttcagacctcctttaggagtttcattataagtatttacttaatttttttttaaagctaggcacatgaagtctagatttcattggtagcttgcagcactgctttgtaagtgagcaatgtctctggtagagatacggctcctgcagtggttccaggtaaagctgccctgaggggtgctatgccacgtggaagctccccgcagagcattttttgggggaatgatgcaaggcaaatagagcaaagtattgggaaatagtgcaatatagaagtgaattgaaatgtgtatttttaatgttcatttttaaaatgccagttgtattaataacattgaaatttacattgcagactcagtccgctagtagcacactccagaaacacaaatcttcctcctcctttacaccttttatagaccccagattactacagatttctccatctagcggaacaacagtgacatctgtgggtaagtacagtagcaacaagaaagcagctgacaaatgggactttatctttgagttgctcttttgggtggcttaggtgtagctggttgttcacaggcacagacctcgggtacagaaacttcccatcccagttgtatgccttatttgcaatgagatgcagagtccatttcctttttccatatacattgcttacagatttcttctctttgacaaagtgttggttataccacatgaatatttacttgaagtatactggggaagggaggcaggcatagtgtgtgtgtgtacagaaaataatttcaaatatattgtgtttcagtgggattttcctgtgatgggatgagaccagaagccataaggcaagatcctacccggaaaggctcagtggtcaatgtgaatcctaccaacactaggccacagagtgacaccccggagattcgtaaatacaagaagaggtttaactctgagattctgtgtgctgccttatggggtaggtgtctagccactactccaacactttcatttttgttctgagtggtggctggtcttctagagaagtactgcattgaatagtttgtggatagacaggatggaagacttctatgatgtccatctcctgttatatgcagagtggtatattagcagactggtgtggcacatgtatatgattgcactcattttaactgtcaaatattggcatgattaatctccattttatttttattaaacaaatttttgtagtagttttgttacgtggatatattgtatagtggtgaagtctgggtttttagtgtaaccatcagcccattatactcaatagtgtacattgtacccctgaaccctgaggttgactgttctcactataaaattcaatcatatctagcagtggaaatgttggagaagtatatttataaaaacttactgcaacatgcaacccagtgtttttcatttttcatgcttgtaatttccaagtactttacagtgactattcttttgactattagcattcagtactttataaaattatacaactgtacaattatacaacttggaaatatatcatggagaagtagaagatagagtgtaagtgccacaatacctgcagcttttgtgttttgaaaagagtcttcagctttatcttgttactccctcattctttctcactgtaaaatcttgaggttgatgtttatatgttagtttttagaaacacacataataggatttcttcacaaggcccatattttgtgtagttattaccagattcttgacataggagtttaaaaaaatctacttgatactgaagattgaccaggaaaatatcaaaatattgtgtaaaatagaacctttgaaatggtatctgtctggcagcagttctatcaataaatatctgtcttttctaccaataatttctaagctgttttagatcaacttgcctagatatatgcagggaaacctaagcataatattcaaataagttccaccttgacaaggatatagtcagggcagaatggccaacctcaagaataaaattatatgaaaatgaatcacatattacatatttaaatatttttcttatactgataatctttttagttgtacagcatttttttttttttaatctctaagggttaagtcactatgcccacaagcattgcttgggtagatactgtcctccaaatgttgggataatcccaactcaatcaactctataaggaccaggcatgaacagagagagggctgtaggagcgttgttctctcaatgccgtcacaattatttatttcagattatctggaaatagggtgtgggtgggtgtgggcatacatgtatgtgccatgatattcttccgcctcactccctctacacaaatactttattccttgtcttggtgagtttatgactgaggaaatcagtacacacagatatgtgcccaattccctaggaatgtagggtcatctgtgctacatgttacaaaggtgattctgacagtgaaggttctaggtcaaggaacaagagcatttggggaaatacatgaatgatcaagagggagaagtgctttggccaaggggcaggcagtcttagatgccagtccaaggcttttggaacaatttctacatggaatgtgtagtttttgaagatagtcatgacgtgagtattttagcaagattaggattgattggatgtacatcatgagaaagtggagagaagctcctttaacaaccttaattaaggtctctatccgtcacttaaaaggttgccaaaggctgaacaattgtgagagcagaggaaagggaaaggagggacagagaaggggttttctctggctctagtggccagttttagctagtttggcagagcagcttgggagctgttgatagaagcagccaagtcgcgaggctagtttcagtagagatctgcagtgggtggaaagcaggaggcaaagtagcagcgtggaattaggagttactggttctgaggcacactcatgcacaggtgggtgggtgtcaccagatggacagcagtggaaatgtctccactgaggaagcagagggcaggtgtggaaataaggaaggaggcagcagaagagtgtggagactgtgacggtacaaggttagagaagtagggtgagtcaaatatcaaatcacaatattttgatagtcctaagaaatggaaggacaagagaactgactacagttgtttcttgatgatggtggaaagtgatctttaagaaaagcttaaatgtgagtgatggaagccgaatcataagctgttaaggatttgagggctgcatttatatggcccattccagagatttgccaatgaaagatgaggaagcacaaagagatcatggtatcagatgaaggtttgttcaaatgtgtgatgtggctaattagacatagaatctgtaaagataggaaataatcagcatataacattctcgaggaactgaggaagaactagaaactaatggattattaaggaaattgatgggatgagggtttcttgttctttcccttatcctttcttatgtttaaatatgtcagcatcattgctacatggtgatgtattgcaggattggttactttaactgtttaacctttgactattttaaggatttctgcttctgggtgaattaaggaagctacacttttttccaaatagatgatgttatcctttctatacaacctggggatttgccaagcacagcataaaattgaggcctttctgtgtccctgaaacaggagtgaatttgctagtgggtacagagagtggcctgatgctgctggacagaagtggccaagggaaggtctatcctcttatcaaccgaagacgatttcaacaaatggacgtacttgagggcttgaatgtcttggtgacaatatctggtgagtgtttgttttgtaaaccagaatatgtgacaccatcttaacaatattgtagctttacacactaaacttcagttagctcattcactgatgtactggctaaataaggtacaaccacattgagacttgacaataatgtgagctgaagacgtattcagaggtgacacacacgcccatttgatctctggctcctccgaaagcagtcttgagaagcgtatgaatgtgctctttctcactggcatctctcactgccctctctgcccagttgcttgttagatttcatttgccttgtccaatatgtaggtctgtgtccactcctttccaccagacttttttttttttttttttgagacggagtcttgctgtgtcgccaggctggagtgcagtggcgcgatcttggctcactgcgagctccgcctcccaggttcaagcaattctcctgcctcagcctcccgagtagctgggactacaggcaagtgccaccaagcccagctaatttttgtacttgcaaaaggaagtattctttgccattattgtaaaagtattgtattatggtttttattatgtgaattaacacaattatgtctcttttttacttatttatttatttatttattttttgagacggagtctcactctgtcacccaggctggagtgcaatggcacaatctccgctcactgcaagctccgtctcccaggttcacaccattctcctgcctcagcctcccgagtagctgggactacaggcacttcccaccatgcccggctgattttttgtatttttagtagagacagggtttcaccatgttagccaggatggtcttgatctcctgacctcatgatccacccaccttggcctcccagagtgctgggattataggcatgagccactgcgcccggccaattatgtctctttttaagaagagcatttttcttagtataaattgtgtaatataaactagtacaggaaaacaactacaagaaataaaaagtagaatcatccagagatcatatcttttaacttttataagtttttaaattccagttttttaagcatacaccacactcactgtatacttaagggaaaaaatctgcataaaaatggttatacaatatttcaaacataggataatggcacccaagtactaactataactagccagtttgaacagttgttgcagtacactgttgtacatacagtcagcatccctgttcctcccatatctacctgtccatggcaacctctttcctgaagttagggtgtatgccatccaggcctgattgtccaaaacacgtagtctgctttctccatgccattgaacatccttccatggcctccattttatatggctagaggatgtttccttgcatagatgtattaaaatgtatttagttatcttctcttgctgccctttaggtgtattcccttttttctctcatgtgaacatttttcacagatatccttgtagcttacttaaccttcaggcacataccatgttgcatagatcataatttcctaataattagtgttattccttggtcagatggcatgcaaaattataagactttaaatgagtcttatataccactacttacagtcacttatgatattataatcacttatgataccaccagtgatttttatttaattatctgcttgttagtacaagcttgttatgtaacatatttgcttgaagttattttacttctaatatatgctttggttgttaagtaaaggagtttcttgaaatgcaaaaatttcactatttatacttaaatgaggaaacagccatttaaaactagagtgctgatggatggtagttttttaagttggagaaaacaaatctgcatttagtgatccagtgaaacaagacagttcatggggatcaatactcagctgagaccaggtgcggtggcgtatgcctgtaatcccagcaatctgagaggccaaggcaggaggattgcttttgcctgggatatcgaggctgcagtgagctgtgatagcaccactgcactccagcctgggtgacagagtgagagcctgtctccaaaaaaaaaaaaaaaaaaaaaaaattaataattataatcagctgataccagtaatcattttttggtctacttttctgttttttttttttttccttccttattaactttcagtggttttcacaatcataaatgtagtacatgtcaattgtaggaagcttcaaaaatagaagaaacttaggaagaataaaacaaaatgtcacccccatctcagagataactcttgttaacattttatatttccctctccttttctctgtaagtatatctcacaagatggaaacaaaacattatatataaaactgtgtggtctttttcttctcttaacatatattgaatattttcctgcaaacaattccccaaaagttaaaaggattatactgaagtatgatatacagagaaagtacagataagcatacagctcaatgagctgtcacatgcagaatccatccagatagccccaccctggtgaagacatggaacattgccagcaccccaaaactgccctgtgaagccaccctgggactgcccccagaggcaagcactgtccagactttgaacatgttaggttgattttgccttcattgaactgattttatataatggtaaaacagtatgtgttctagtgtcagctgctgcttttttttttttttttttaagtagactttttctaaacgttttttcagtattttgcagtttagccattctgaaggggtgtaggaattaataggtgtatctcattttaatttgcaatttcctaatgatgtatggtacatcttttcttatgtttgtatatcttctggtgaagtatttcttctatctttaatccattttgtaattggattgttgcttgcttattgttgagttttaagagttcttcgtgtattttggatctaagtttctgatgagatatgtgttttgcggatattttctgccagtttgtggcttgtttgttcatgctgtggaatgatgtcttttgcagaagagaagtttttattttagtgaagtccaacttactagttttttctttcatgaattgtgcttctggtattgtatctaaaaagtcattgccaaatccagagtcacttggattttcttctgttaccttctagaatctgctttacagctttgtgtttcacatttaggtccacaatccattttgaattgatatttgtgaaagtttcaaagtttgtgtagatttattttcttttgcctatggatatctagttgttgcagcagcattcattaaaaagactaacctttctccattgaattgcttgtgctcctttgtagattactgctatatttgtatagttctatttttttttttttttgacacggagtctcaatctgtcatccaggctggagtgcagtggtgagatctcagctcactacaacctctgccttccgggttcaagcaattctcctgcctcagcctcccgagtagctgggattataggcatgtgccaccatgcctggctgatttttctatttttagtggagacagggtttcaccatgttggtcaggctgatctcaagctcctgacctcatgatccgcccatctctgccccataaagtactgggattacaggcgtgagccaccgcgcctggtgtatagttctatttctgggctctattttttcccatttatctatttgtctctttttgtgctaataaccacactgttttgattactgtagatttatagtaaatcttgaagtcaggtactgtcagtctttcaactttgttcttttttaatgttatgtggactgtgttgggtcttttgcctctagagtcagcttattgatatgtacaaaataacttgggattttgattagaattgcattgactctgtggatcaagttggaaagtactgatgtcttgacagtattgactgttctgtccattaacatggaaatctctctccatttatttagttcttctttgatttcatcagaatttgtagttttccttaagtaaaactagcaaagggctaattttattagatttattatacccattttgtttttttaagtactagtataaatggtgttgtagtcttaatttcaaattctaatgatttgttgctggtatacaggaaatacaggaaagtgactcacttttattttattaggcttgtatcctgcaaccttgctataattcttgctataattgcttattagttccagcagggtttttggttggttggttggttttggattttttttggttgattcttcaggattttctacctagacagtcatgtcttctgtgaagaaagacagttttatttcttcctccccagtccttgtaccttttatttcccttttttgtctaattgcattagctaggacacccaatataacatttactaggagttatgagaagggaaatccttcacttgttctctatcttatgaggaaagcatctagtttcttgccattatgtatgacgttagctgtaaggttttatggtagatgtttcttgtcaaattgaggcagttccccctctattcctatttccctgaaagtttttattataagtaggtattgggttttgtcaaatgtttttctgcatctgttgatatgatcatatgatttttcttcttagcttgttgatgtgtgtggctgacgttgccccccatcatttttgttgttgttgcttgtagctgtagtctctttgttcctttagatgactacaccacaatgtatttactcattttactatccattcagacattattgtttcctgtttggagctattaggaaccatgctgctatgaacattcctgttgttgtacttgggggcatacatatacatttatattaggagagagattaccagaccatatgtaagatatgcacatatcctactttaatagatagtgccaaacttacaaaaacagttctaacagtttacaacactagtttctgaagtttctagttgttccacatcttgcctacctttgatattgtcagtcttttgaattctagacatactgataggtgtatgaaatcatcttattactgttttaacacacgttattactggtgagaatgagcatctttttgtgtgtctgtgagatcacttcttttccaaagttccagttatagtggcacgtccagtttttctattgttatctcctgttctatttgatttataggagtttttttacatattctggattatgactcccttgtcagctgtttctgtggtacacatctccaacttgtgacttgcctttcactaggtttaagtgctggccttaagtgattgatttcttttggttactattgttattaatgatgagacctacttctggatatgcatgtaaaatatttatatttattttgctaggcaaaaaggataagttacgtgtctactatttgtcctggttaagaaataaaatacttcacaatgatccagaagttgagaagaagcagggatggacaaccgtaggggatttggaaggatgtgtacattataaagttggtaagttctagaagcgtcatattttgtttttccagagtttgattagagtttgaattttaaactttaaattttcacaggttttttgaagtttgtaataataaacttgtttctgaaacacgtggatcatttctggtgttctttctgtttccaaggcacattctaatcttgaagtctcatctagacattgtcttactccctctgtgcacctatatgcataacagagttcgtccctgcaactcactccgccctcagtctcccccacgctgtgcatcttgtgagagtctttccactcctcctctttgacagtccacattcttctcctctgtaagatgtggttcacagtaacctctttaaggaaatcttgtcagtggaagccagctgacttgagtccttttttacatgccaggcttattctccacttagaggtctggaggtccttggcaggcactgataagagtgtttgagagtttgactcaagggcttatggcctgccattttgaattaagtgcctgtgcacagctactatgctccttactagtaagtgagcccagctggccagtcagtgttttatggcaattgtattgttttttctccttggcatgaagcagtgattctcatgaagtaaaatctcacaggaacaaaaccaaaactctttttttttttgagatggagttttgctcttgttacccaggctggagcgcaatggtgcgatctcagctcactgcaacctccacctcccgggttcaagcaattctcctgcctcagcctcctgaatagttgggattacaggcaccttgccaccacgcccagctaatcaaaacaatttttttttaaacatgaaaaaaccaaaatactggcactaatgttagacatacgggagaaataatggaccttagccaaattaaagttttataggaaagatgttatagtctaacagaatttaaacaggaagtttttctatatacctaaaactgattaatgttacgggcctattgaatgtttgtttctgcttgtgtgttttcttttttctatgtttatgaaaatatatacatcatcagttcctctgttccgagggatgttgtcatgcttggcattgtcttgttggtgtagtttgtctgcacccctcagctcgtgggttaatggtgattgtgggagctgcctcagtatctctgacagttctaatgatacgggaaagtagaactatctgcttaggatagattttaggattagggttttctgtgtttatgtgaagtatttttatgtgttgaggtataactaaaatcatctaaggctaaatgtaatgaaacagctcataacagatgaaatgtacatgaatagattatcctgcagggggagcaagaggcagacgggttaaaagtctgttgggcttttccccagaacaaaacagtaggccttcaggcctgtcactcatacagaatgaatcacaagtattttcaggagataagtgtgggtaatatcattcattcgttgtcattatggttgccaccaagaatagggagctatttaaatgtatattaaattaataaaaattaaggaaaccttaaaatttagctcctcaatggcactagtacattctaagtgtgcaatagccccatgtgtgtggtggttatattagcaatacagatacggagagtttctatcatcgcagaagtctatgaaacagtaccggttttgtcagactgttataaacctttgtgtcttaatgttcgtttattgatttatttaaacagtggtaatatatagagtttaacaaggggagttatcagttaacaagttcctgctcatgcacaaagaagaaatcaagtagcggtgtgatgttagcttgtaaagaaatcatggatctgcattagtaagtcacaggtactcaaggacccctgggagtacttgttttggcagagttgcctggcagtaagggcaccaaaatagctatgggaaggaggcagttttactacttctgtagatcaggaaatggtcttagtgatacttggacttgttcacagatacttctgttggtagaattcaggactcatgaatattttagtataagccttttttcttcctcagtctgtgtgagccccatgcaggactagggaaagttgtaaggaggacctcggtctctgtgtgtttcaggagtctcttggctgattaatcatgttgttactcatttggagtaatactaagcccttgaagacttcagggtggtatacctggcattgtccttgattttaaaatatcttggaatctattataagaagattaggatcattagcgaaagtactcattgatggtcaaaatacattaaagagctggaaaaggaaactgtgaggtgtgatctctctctctgaatttttcccctgcttgtttggatgaatgaatagaaggcatatttataaagtttgcagaagacaactaaaacagtttagagggctatgttgatactgacctgtgcttctcttgcttttttatttgctgcttttcagtaaaatatgaaagaatcaaatttctggtgattgctttgaagagttctgtggaagtctatgcgtgggcaccaaagccatatcacaaatttatggcctttaaggtaacaacatcaagtgaatttaaaagtagtattggccattcaagctgcaaccaagagtcagggaatatgtttaaaaagtctgaatgttaaaattgctaatataaaagctatgtgctaatatagcatataactttatcataaaccatttctaatgtaataagcttagttaagctgctttctaagcccacagtgagaaggagagagagataaatgttgggtagacactttaatcgatgtggcaatgtgttcacagaggaaaagagaacagtacttccacccttcagttaaaaaggtgaccttcacctgagtcatggaagcgtgtaaagatttagatgtgtttttgataacaaaactgtgtctatcgggcagttttaagatatatctgttcataaaatactaattaaaaattaaattacagaaattctgatgacaacattatatactaagtgaaaaaagttaaaatatttcatatgattccatttttgtttcaataaaaaactcagctataacatctgaactaatgtacaaattaagatgtttttgccattttgcatgtatacagttttaggaaagtaaatgatggagtacttagtcttaaaattaggactgttttcatttgtgagttcacaaaaatactcatgaaatttacaaatatacctcacattgcctggtgattggctttttagaatagtttttttatattttattgaaggggtaggtttcatttatttgcaaaatttgtgtttttggattgcttactgcttgatttcccagtgaagcaggatagatggagtcacaatattcgcttaaaaaataatattcacttaaaaaataaatccaagtgttactgaataaagagaattggttatacagttatattatcttctgagatctggccttaatatcctttatataccaggtaccgtactagttggttttatacatattaccttatttaaagctgctgtttcattatcgtagtctcgtgaactgtgggtagtgatgtcagtgaaaaatggagaccaccagcacaatccaggctgttgtagcacatacagccttttcaccattttagtctagtcagaaaattagagaccttatgctactagtatgataatagtgatacaattttcagtgtgtgactcctacaactcctctcgctctactgtgcatttgaatagttgagtagcatttttaggaaagtcctcactattttactttgcatgattttctgatcaaggcagccaaaagcacagtaaatgacagagcagaaatcttgatctggaaagggagatttggaacatatcttctggaagaagtgtcttctagatgctaattaacaggcaaaaacgtaataaagactaattttgtagagtattgttgccttacggttgttgccagtgtggctcagtaattgcataactgagtatgttgggtcttctctagtttgatctattagaagtaagttctccggccgggcgtggtggctcacgcctgtaattccagcactttgggaggtcgaggtcaggagatcaagaccatcctggctaacatggtgaaaccccgtctctactaaaaatacaaaaaattagctgagtgtggtggcgggcacctgtagtcccagctactcgggaggctgaggcaggagaatggtgcgaacctgggaggcggagcttgcagtgagccgagatggcgccactgcactccagcctgggtgacagagcgagactccgtctcaaaaaaaaaaaaaaaaaaaatgttctccttcatcttctcacttctcttatggcttctttgcagtcatttggagaattggtacataagccattactggtggatctcactgttgaggaaggccagaggttgaaagtgatctatggatcctgtgctggattccatgctgttgatgtggattcaggatcagtctatgacatttatctaccaacacatgtaagaaagaacccacactctatggttggttgactggcttcattttgttttgactttcttctttactctgcttagtgaactaacacaagcagggattcatttccccttggtgtgggggtgagtatttaaatgatacgcaattttcaatagctccatgctcttagacaagtggaaatccgccttcctggctctgtggagcccttgtgaaaacctcttagctcttgctttgactaacatgggatggatttggggcagttgctgccaggccagaatatccctgggttgggagtggttctcaattggagcccagcatccaatgtttcatgggcctcaggagatatgagtcagtagagtatattactgggaaaaagcagagttggggatatatattgcatgactattctaaaatgttaatctaattgctgtatttatcttcagagatatggtaccagtgcattcactaagagtcttactgagcacttgcacagggctggaaataaccacagacgttcttccctgtactttgttcctgttctctagatccagtgtagcatcaaaccccatgcaatcatcatcctccccaatacagatggaatggagcttctggtgtgctatgaagatgagggggtttatgtaaacacatatggaaggatcaccaaggatgtagttctacagtggggagagatgcctacatcagtaggtatggagaacttggggaaaggcagcatttgtgaaaatggagccgtgtctgagactccatttatttatcatgctgattttgtatgtccttcagaccttttgactaccattgaacagagtagttggcagtagatggtggaaagttagattgtaggccgtggaaatagtcataggtctattttagaacaaaatccaagtaattattttctactttaaaaactctattatcataatctctcatttaatccttaaaacatccagaggaatatcggacatgtttttgttgaccactttgtaaagggagacagagaattggtaaagagacagagaattggtaacgaattggtaaagggagacagaaagggaagttatttgcacagaatgctagagccataactacaaacagccttgtgcatacttttctagtttgcattcagtaataaagaccgatatttgacattttcatgggtttctattccaaaactattttggttttattgtaattaggtcactgtctctgatcactcatgatttctcttccctgccgtctctcatgactggattgataaaaatctgtgcactaaactctaaactcagtgggtaatttttctagataggcgtgaaaggcctaaggaaaatgaaatagatcaaccactgatgcaagtaactacttcacaggataggcaaggtggttacaaaggcagagttccttgaaaacaaatccttaaatgctaggcatttaaattttaaattttaaaaagatttagaagtataaaaatatatttttattaagtaagcaacatcttttcagggctgtttcctcatctttaacggtttgcaatttttccctccccaaaagcatatattcgatccaatcagacaatgggctggggagagaaggccatagagatccgatctgtggaaactggtcacttggatggtgtgttcatgcacaaaagggctcaaagactaaaattcttgtgtgaacgcaatgacaaggtaatagttcccttatggattctttttagttgctctatcttttaataatggcttgttttccatggagtttgatgattaatttccttggagttttgataaaaataatcaaggaactttttaaacgttgctttttagtcatgtttgtgaggattggggaatgttttgctttttgctatgaggggatagagatatttttctctgtagaaattaacatatttgggttttgctttgtatatgtatttttaactctattagatgaccagtctaggctataattagagatagggaagataaaagctgccagttcagttggctggaattcttttgtgagtggaaggaaccgccgtgccatttgggtacatcaaaaggttcctctgacctaatgtgtgtcaagaagatgccccttgttagtctgtgagtggtgaaattgcttcctaggtttgcatgacagaaatgttgcacagtaaaaatcatcttatgcagacataacatacctcctgcaccagagaccccatggcatgacaccccctttgcttttcaaaactggccatatcactccagggacgattcctgtggcaccttcctcccaggaagtcccttttaaactggctttggagttgagcagatagatggccaggggcgttgacccatccctgtttgccaagggagaaggcatcgagggtggaactgatttttactaagcctaccctttctttcttctgcccagtcagacaaaggcatgtctgactacctaaggcaagacaccacgacctttgaaacttggccctgaagaacgtttccaccttttgcgtcacattgacagactagcagtcagcccagttctcagatttaaacatttagtcatttaatgcaagaaagaagaagctacacatatgtccttggcagctggtcctgcttgcccgatacatcccaaacacaaagtcacttcacctctacccactgtcttctgcaaccctacaactcagtttcaagtggagttttgcctacagattatctcccaaatctgtgaccttgaaaatctctacagctcagacctaatccaggattttgtcagcttgttggcttatactttcctaagtatgtttaccatagctgcaactatagcattctttgaatttcaggcatttaaatatttttatcatgcatgtcatgtcctttaagatttattaataaatggcacaaaaattctatttatgggttatatgaagtaattaatacattttttgttgatttttaaaaagaaattaggttgttaaggagtcttccgtgatgctcattgtgttttttaaagacatttatttattagaaggtgttaacagtagaagtggaaagaaataacttcagaaacatccatttttttcctttgttgtctcacaatatgccaacgtgtaaggagttagtagtaacaagcctgagttgtaataaaaattggctgcagatggtcactccttacaaattataaattgataattgccccagaggtttttgtgggttgtttttgtttgtttgtttgttttggtgacggagtcttgctctgtcgcccaggatggagtgcagtggcgtgatctcggctcactgcaacctgaacctcctgggtgcaagcaattctcttcctcagcctcctgagtagctgggattacaggagcccaccaccatgcccagctaattttttgtgtttttagtagagatgcggtttcactatcttggccaggctggtcttgaactcctgacctcatggtccgcctacgtcggcctcccaaagtgctgggattacaggcatgagccaccatgcccagcctttttatttatttatttattttttgagacagagtcttgctctgttgcccaggctggaatgcagtggtgtgaccttggctcactgcagcctccacctcccgggttcaagtgattctcatgcctcagcctcctgagtagctgggattacaggtgtgtgccaccacatggtatttttagtagagatgggttttgtcatgttggccagactggtctggaactcctggcctcccaaagtgctgggattacaggtgtgagccactgcacctggcctcagagtttcttttgaaaaggctctttgggagtctaagcttctcgtacttgacagtgttgaggatgatggtggcttagattccctggctggaagtgcttcatgaccatggtaaccattccctctcttttcttgcttttgcaggtgttctttgcctctgttcggtctggtggcagcagtcaggtttatttcatgaccttaggcaggacttctcttctgagctggtagaagcagtgtgatccagggattactggcctccagagtcttcaagatcctgagaacttggaattccttgtaactggagctcggagctgcaccgagggcaaccaggacagctgtgtgtgcagacctcatgtgttgggttctctcccctccttcctgttcctcttatataccagtttatccccattctttttttttttcttactccaaaataaatcaaggctgcaatgcagctggtgctgttcagattctaccatcaggtgctataagtgtttgggattgagcatcatactggaaagcaaacacctttcctccagctccagaattccttgtctctgaatgactctgtcttgtgggtgtctgacagtggcgacgatgaacatgccgttggttttattggcagtgggcacaaggaggtgagaagtggtggtaaaaggagcggagtgctgaagcagagagcagatttaatatagtaacattaacagtgtatttaattgacatttcttttttgtaatgtgacgatatgtggacaaagaagaagatgcaggtttaagaagttaatatttataaaatgtgaaagacacagttactaggataacttttttgtgggtggggcttgggagatggggtggggtgggttaaggggtcccattttgtttctttggatttggggtgggggtcctggccaagaactcagtcatttttctgtgtaccaggttgcctaaatcatgtgcagatggttctaaaaaaaaaaaaaaaaaaaaaaaaaaaaggaaaaaaaaaaagaaaaagaaaacgtgtgcattttgtataatggccagaactttgtcgtgtgacagtattagcactgcctcagttaaaggtttaatttttgtttaaacctagacgtgcaacaaaagttttaccacagtctgcacttgcagaagaaagaaaaaaattcaaaccacatgtttattttttttttgcctacctcattgttcttaatgcattgagaggtgatttagtttatatgtttttggaagaaaccattaatgtttaatttaatcttaataccaaaacgaccagattgaagtttgacttttattgtcacaaatcagcaggcacaagaactgtccatgaagatgggaaatagccttaaggctgatgcagtttacttacaagtttagaaaccagaatgctttgtttttaccagattcaccattagaggttgatggggcaactgcagcccatgacacaagatctcattgttctcgatgtagaggggttggtagcagacaggtggttacattagaatagtcacacaaactgttcagtgttgcaggaaccttttcttgggggtgggggagtttcccttttctaaaaatgcaatgcactaaaactattttaagaatgtagttaattctgcttattcataaagtgggcatcttctgtgttttaggtgtaatatcgaagtcctggcttttctcgttttctcacttgctctcttgttctctgtttttttaaaccaattttactttatgaatatattcatgacatttgtaataaatgtcttgagaaagaatttgtttcatggcttcatggtcatcactcaagctcccgtaaggatattaccgtctcaggaaaggatcaggactccatgtcacagtcctgccatcttactttcctcttgtcgagttctgagtggaaataactgcattatggctgctttaacctcagtcatcaaaagaaacttgctgttttttaggcttgatctttttcctttgtggttaattttcctgtatattgtgaaaatgggggattttccctctgctcccacccacctaaacacagcagccatttgtacctgtttgcttcccatcccacttggcacccactctgacctcttgtcagtttcctgttcctggttccatctttttgaaaaaggccctcctttgagctacaaacatctggtaagacaagtacatccactcatgaatgcagacacagcagctggtggttttgtgtatacctgtaaagacaagctgagaagcttactttttggggaagtaaaagaagatggaaatggatgtttcatttgtatgagtttggagcagtgctgaaggccaaagccgcctactggtttgtagttaacctagagaaggttgaaaaattaatcctacctttaaagggatttgaggtaggctggattccatcgccacaggactttagttagaattaaattcctgcttgtaatttatatccatgtttaggcttttcataagatgaaacatgccacagtgaacacactcgtgtacatatcaagagaagaaggaaaggcacaggtggagaacagtaaaaggtgggcagatgtctttgaagaaatgctcaatgtctgatgctaagtgggagaaggcagagaacaaaggatgtggcataatggtcttaacattatccaaagacttgaagctccatgtctgtaagtcaaatgttacacaaaaaaaaatgcaaatggtgtttcattggaattaccaagtgcttagaacttgctggctttcccataggtggtaaaggggtctgagctcacaccgagttgtgcttggcttgcttgtgcagctccaggcacccggtgggcactctggtggtgtttgtggtgaactgaattgaatccattgttgggcttaagttactgaaattggaacaccctttgtccttctcggcgggggcttcctggtctgtgctttacttggcttttttccttcccgtcttagcctcacccccttgtcaaccagattgagttgctatagcttgatgcagggacccagtgaagtttctccgttaaagattgggagtcgtcgaaatgtttagattcttttaggaaaggaattattttccccccttttacagggtagtaacttctccacagaagtgccaatatggcaaaattacacaagaaaacagtattgcaatgacaccattacataaggaacattgaactgttagaggagtgctcttccaaacaaaacaaaaatgtctctaggtttagtcagagctttcacaagtaataacctttctgtattaaaatcagagtaaccctttctgtattgagtgcagtgttttttactcttttctcatgcacatgttacgttggagaaaatgtttacaaaaatggttttgttacactaatgcgcaccacatatttatggtttattttaagtgactttttatgggttatttaggttttcgtcttagttgtagcacacttaccctaattttgccaattattaatttgctaaatagtaatacaaatgacaaactgcattaaatttactaattataaaagctgcaaagcagactggtggcaagtacacagcccttttttttgcagtgctaacttgtctactgtgtattatgaaaattactgttgtccccccacccttttttccttaaataaagtaaaaatgacacctattttatgtggcatgagtttcgaatatgttctgacccttcagaatgtttccttcctgtgaggatccatattttatgcatacctgcctaccctgagcttcccgtaccagagcaggctcctgtattttgctatttcagatgacaggggcttgcccaaggccaggtatagattacaaaagtagcaaatgtttgtctaaagacctcagagatgaagtgggagatgaacctccatcaccaggttcctgaagacagtatggagtaaagctggtccttaaagaaatgtcacatttttgcagttttgaatttggatcaaaaaatacaacagcatgatgtctgtaataggtcaattaaagtagctctttctcagtttggtgcataaatactaacttgggtttaataattggagccccttcaatgtaaggtcattgtgtcttcagcgctggggttccccatcaacccccccataggcctggtaggcatgatcgccgtcgggcaaatctggggccatgctctcagtgttggcacctcgccttagtctccagggctgcccgtgctgcatcatcatcaattaggcatattaataaaccacttcgtgtttcatcctagaaacatgctattctctctaaagggaaaatataactccttaggctgtcagatgagtaagtttttttttttcctacttggtgtgttgcagttggtggatgattatgaataaaaatctggtggagttttcttgggaccatcatgcaatc

SEQ ID NO: 1512 - DNA, 654 bp, Homo sapiens
aattcttcctgaaacagtctcatctttgcctctgtcctgcccagcttctttgctgttatcttgttcactatttcctaagggatacatagcctgcatattagccgagattgtttctcaaatttaaccacttattaaatttaaactctgctcctcctgaactaccaaacatgctggcacagagcaagcactcagagtccctggctgtttgcttaagtagcatgaaataactcctatgttaatccaagggaaaaccagcctgcctgtgcagtgtgggacgggcaaggaagtgctctggtcttcctcttcttccaggtcttccttccaggaagtgctggggaagtgtagtcccaggagggctgcagagctccattgcactgggcatgggccatcctgtcccataacaggttcctagtacttaccagtccctccagctggagcttgggtgctggaataacactgcaaggactcttgatttctgagaccaatctagtttgcttgtttctaagaaatttggattagatattccagcacaaagtgacttttaaaaaatactcatttctattttggccaaaagtgtaaaattcaggcaagttactcaccagagttctgtggagggatgcggacagagctgaccaaggccattctgctcttacc

SEQ ID NO: 1513 - DNA, 511 bp, Homo sapiens
ataaataaagatggcatagccattaaagttgtagtttttagatactagagcaggagcatcattcattttatgaccccatctccacccatgggaagctgatgagttttgtgtattgaattcgaagagcagagaatgggggaaaaggagattcccccattgaaaacctagataatgagagaggcggaaccaaaagcagactcagaacttcactgagaataatgggggtgtagtagtcaggtgagagagactggactaccaaatcatcgttgctatccagttattccagatgaaagatactactttacatttcttagggcatcatttttaagtgttggctttcagattaaatactagttgagagtggtgggaagacccagaaggaatacttaaactataataaatatgtactttgtgtatccattataaatatgtctaacatccctgatagctttaccctaagctttcttgtttaatggttaattttagtgtcacaaataaagtttgtgttaat

SEQ ID NO: 1514 - DNA, 1052 bp, Homo sapiens
ggacattgcccccccgcctgctgaggctgttccttcctgctgcacttgagcagcctcatcttccttcatctcctctcatgttcacttctctttgcctggaccaatggggaaaaaagtgcacagaatgagattatgtgactacagcaattctgagttagctttgattgctctgcagtaaaattaagggaccatatctttctcatgcacatgatatatagtttcaaatatagatctgtacatacgtgatgatgaaaagttcttcaggatgaggatgtatcagagagtgtgaattgaggccagtcttctgtttcctcccaaactcttaacagattgcatatcttcatgcaaatcttttcatgtattccttgtatactacctatagaaaggtgggacttgggagggtcacttacaactcctgtgatcttattttctcctccaggggctccttgaatagagttttcccccattttactggccaaggctgcagttagagctgtggtttgtcctgcaggggatatttgtcagtgtctggagaaatttaggttaacgcgactggagaagtgctattggcatctagtgagtggaggccagggatgctgctaaacaccccgcggtacacagcagaccaaagaatgatctagccccagataccagtagtgctgaggttggaaaactcttaagttagtaaatatacaactgataggaaaaacatgaagtttcaataattaaaaagctttgcacgaaagtttattacagggctgggcatggtggcttaggcctgtaaatcccagcactttggggggccgaggtgagaggatcacttgagcttaggaatttgagacctgtgttggcaacatagtgagaccccatctctaatatatatatatctgggcatggtgtctcctgcctgtagtcccagctacttgggagggttgaagtgggagaatggcttgagtccaggaggttgaggctgcagtgagccatgattgcatcactgtactccagcctgggcgacagagcaagaccctgtctccaaaaaaaaaaaaaaaaaa

SEQ ID NO: 1515 - DNA, 431 bp, Homo sapiens
ctgtgaattgacacatatagcttcctctactgtaaaggttgatgtggctaatgagaaatatttccacatcttctcctttatttcaaggagataggctgtggaagtcagacgtctctaagccccaagctgttttatgtagcctgttgttagtatgtggaagctgaaattcttacagagttactctagaattgaaaaatctatctggaagtttggggagtactcatagtgcactaattattacaaattttcattatcttacttggattaaaaattattagagagccatttgtcatactgcttagattacaaacaattatagagttctagagtgcattataagctcataggaaatggaactttgtatttggtggcaaacctttattctttaggtagatatttgaggtggctcagcagatttatatgttgcggta

SEQ ID NO: 1516 - DNA, 1532 bp, Homo sapiens
cttgtgttgatttttgtataaagtaagagataaggatccagtttcattcttctacatgtggcttgccagttttcctagcaccatttattgaatagggtgtcctttccccactgtatgtttttgtatgctttgtcaaagatcagttggctataagtatttggctttatttctgggttgtctgttctgttccattggtctatgtacctgttgttatactagccccatgctattttggtaactatagcattgtagtatattttgaagttgaataatgtgatgcccccagatttgttctttttgcttagtactgctttggctatttgggctcttttttggtgccatatggattttaggattgtttctgattgacaaaggtattttgatgggagttctgtgaagagtgatggtggtatcttgataagaactgcattgaatctgtagcttgctttaggcagtatggtcattttcacaatattgattctacccatccatgagcatgggatatgtttccatttgtttgtgtcatctatgatttctttcaatagtgttttatagtttttcttgtagagctattttacctccttggttaagtataaccataagtattttattttattttttttgcagctgttataaaaggaatggaattgttgatttgattcttagcttggccgttgttggtgtatagcagtgctactgatttgtgtacattgattttctatctggagaatttactgaattcatttattagatctaagagctttttggatgagtctttagagttttctaggtaaatggtcatatcattggtggacagtgacagtttgacctccttttttccaatttggatgccctttcttttctgtctgattgctgtggctaggacttccattactatgttgaatagaagtggtgaaagtgggtaaccttgtcttgttccagttttcaggggcgtaggcaaagaattcatgactaagaacccaaaagcaaatgcaacaaaaacaaaaataaataaacgggacctaattaaactaaaaagcttctgcacagcaaaagaaataaccagcagagtaaacagacaacccacagagtgggagaaaattttcgcaaaccacacatccggcaaaggactaacatccagaatctacgaggaacctcaaacaaatcagcaagcaaaaaacaaataatcccatcaagaagtaggcaaagaacatgaatagacaattctcaaaagaagacatacaaacaactagcaaacatatgaaaaaatgctcaccattattaattatcaaggacatgcaaattaaaaccacaatgaggtatcaccttacttagtgagaatggccataattaaaaagtcaaaaaataatagacgttggcatggatttggtgaaaagggagcacttttacactgctggtaggaatgtaaactaatacaaccactgtagaaacagtatagagattccttaaagaattaaaagtagaactacctttcaatccagcaatcccactgtcaggtatctacccaaaga

SEQ ID NO: 1517 - DNA, 409 bp, Homo sapiens
tgaaaaagagttaagaaagcctaaagtactaatgacacaccgtcaagtggaccaaatacataatatgcgagtccaagaaagagaagagagagagaaagaaacagaaagtgtatttaaagagataatggccccaaacttgccaaaacagaggaaggagatggacatccagatttaagaagtcttccacataggaggacttcagagatgtccttaccaagacacatgataatcagattatcagaagtaagagttaattttgaaagcagcaagagaaaagtgtctggtcacagaagaaagcccccacaaaatgatcagatttttcaccagaaagcttgcaggtcagaaaattggatgataaattcagaatggtaaaaacaaaaccaaataaaacaaacaaataaaaatgcct

SEQ ID NO: 1518 - DNA, 319 bp, Homo sapiens
aaagaagccattatgtgaacaagacacatgcacacacatagttatagtaacacaatttgcaattgcaaaaatatgaaaccaacataaatgcccatcaaccaacaagtggaaaaagtcctatatatatacaccatggaatactactgagccataaaacaaaatgaaataatggcctttgagcaacttggatggagctaaaggccattactctaagttaaataactcaggaatggaaaaccagattattgtatgttctcacttataagtgggagctaagatatgagaatgcaaagacataagaattatataatggggccgg

SEQ ID NO: 1519 - DNA, 18367 bp, Homo sapiens
cttatttgcaggtggactggcagaggaagtggacgacaaagttcttcatgctgcgttcattccttttggagacatcacagatattcagattcctctggattatgaaacaggtgagttagtgtctctcacgttcagaatcctcttactaggaaaataccttaaaaaattaaagtcacatcacaattctaaatatgcattctaaatatggttagtatacactacaggtaagttcaggaaggtgtctggtgacagtgatctcgatggagaaggaatgttctgaggccatgtggttgtgaactctgaatactttccagagtcttcagctgttgggttgagataagacagatttttcaatagaccagtagggagataggtttgaactacattgagatttgaatgttgttttaatctacctgatgggtaccccatcccacctgcaccttcttgcagctgtgctattaaatgaggcagcgggaaagcctagccccataatgggggtgggtgagggcgggggttcttggcctctgcacccctgggtgggtttcccatcgattggtatcacaaccacagttcagttttctgtttacctttgttgtcatttttaagattatagttttaggcctagttttatcatcaaccttgcatatgattgttagcaaagtctttaaactctctgggcctgggaaatctttatttgcaaaatgataaggttatgttggctttctaagggccttctagtctctgagttctatgataaacattattgtgcttggtctttctagttagttcagcattttcctgaagataaagactgagcatctttatcaggttttaggattcatgctttatgcacagttgatgcgcaaaatatatatttagatagataattgataggtcaaatgactttatttttctaattgctttgcatgcaatggttaaggttttaagtttggctttcgtagaataattgaatacttatcaattaaaaatacagtttactattcagctatgtccattaaaaaaacaaagtttattattgcttaaaatattgtataagaagaatcaagaatgagattccttcttcctaaatagtgattggatagaacttctggtgtttggatacgacatgtaactgacttcactttgtgaccatcctgtttcttcccactaccccacatagtaattacttgtttttgtttttccattttgtagaaaagcaccgaggatttgcttttgttgaatttgagttggcagaggtgagagtctgtgttactagtgtctagtccttggtttgtgatgttgttactgattacaaaggaagcttttcaccatttggttaggtttttgggccttaggctgatgcttccagagagatcagaagtaagtgctgttctaaggaaagcgtctctcacataatcagactggactgtgaataacatgtcagacctgccaggccctcccattcttgccctgcagaggagctagctcatgcacccctgttcattgagcattcttgcctggaagtagtgattatttcttgtgccttcaactagatggcaaattgttgcaccaccagctctaaaatcagccaggaagtgctctttgttagaaacacacaaaacctaggcaagaaatacagaggtggcatttttctggatttttgctactgagcatgtgtttagacaccataagaagcatttggctgcaagcctaaacttgtacctttgtctttccttggcaggatgctgcagcagctatcgacaacatggtatggctgggaatcttaattctaactaaagttgctttttggtggtacagaggctccttattcatatatcagtgttctggacttccaaagttacaaggttgcatggggaggtaaaaattctcacatgaaaatattcactgtgaattgatcacttataaaattagttcttactcagactccttcgccatttcagaataatgtaagtcctcatcatccttgttgaccagtctctcactggctctcccatgtttaggataatttgcagacacagtgcaaattgattgcacggtgtaactgcatattttgcaaaatagcaggatttcatgaagtgttagaccaatttacaattgagaagagaaatttaattatggcaggtgcaaatcactgatacaaatgatttggatattctggaaaggtccttgggaaaaatgatgatgctctttagtatttgtgccttccttgagatccttttagttttcatgtctgataagaagtgcaaagataccatactgttgatagaattttgttggaaaaataatacttcagtgcctgttacttttctttctttctttttttttttttttttttttttaacaatcttgaactcatgagttcaagacttctcagcttctcaagtagctggaattacaggctcaagccaacagggctacctgggctacctgttacatttctttctaccaagttacatttctttctaccgattagtgcatagttagtcctgaatattaatggtaagaaacttgtttttattatttttagtttcatcacagtaatttcccagtcagccttttaaaatttttcaattttaccacgaaatcttcatcaccacttcaagtggagtcaccttaaatgacctttcctggtaccgattatctttggataatgagatgttgttttatttgttgttctgttatccattcaccaaacatattcatcagctgtcagagatcatttttctttcatttcaaagcttatcttgacttttgaaggtgaactcaaatactgggaaactgcatttatttttgtaattttggagtgttctgaacccagagttacttttggtaatacaggtctttgtgtgctgctatgaaagaaaggggtgtgagttccctgaaacccacaggtggctttggggtggctgcatagcttactggtagaggcccagggattaagggaggacaaatcatgagtgtgtctcagaagtatatggaaagctggctggccctcttttaacctaagagagtttaagcagctggattttcaatcttttcagaatgaatctgagctttttggacgtacaattcgtgtcaatttggccaaaccaatgagaattaaggaaggctcttccaggccaggtgagtaggagcaacttccagattccctgtgatgttctgcagtttggccttagttgcattttttgtctctatttacttggaagtagatgctaaatgctgcttcctggtagataggagtagatgatggttcacattgggaagggcatgcaccacctttttagagaaacaagtgagtttgagcttctcagcaaagccaaagtgattgtttctgttatgagagaaattcctgcctgagctcatctttcccagttttcttgatattccattcctggggtctccatcaagggctgaaatcagcaaaggctacacctttgctttcggcatagctattttccttagccctactgagagctggacttcagggcctacattctggatgggaactttccttacccctgggagttctcagtggggaattgtctggcatacaggccacatagcatcttccactttgctgaccaaagcagctacttttcagttcaagctgacagcttgaatgaacatttgtttgattctttcctttcagtttggtcagatgatgactggttgaagaagttttctgggaagacgcttgaagagaataaagaggaagaagggtcagagcctcccaaagcagagacccaggaggtgagaatgaagctcctgcttccagagcacaggccggcgctgtccacaggagacttttttttttaagttttaatggaaatttgccaatatgtatatcaaagtggagggaatgaataatgaattcttagtactttggtaaagtcaatattgagttcttagtactttggtaaagtcaatatcgagtgaattcaagggcgaaactttgggtctcttgtccatgttgtgttctatgtgatgagtgtctcagctctgctcaggtatggatttgtgattatcaactgacagggaggaagctgaggtgcccctcttcacccctcctgatcagtccccctccttcactgaagagtttgccacaagggtcgtggtcttcctattcctgtgctaatggaggggagacagaatagggtagtgtcccttccttcaacctgtacatgggttcagggttctccagtcctacgggaacctgctggggcacttccccctgattctcagcatagtctctgacagttgcttcctgggcgtcccctcctctgagtactttgtgaatgttgtcattcttctgtatttctttcttggctcatggtttctctctcttctctcagctgaaacagtagcagtctatctctagttttatgcagcctctgttatgctgttgatcttcatggtctctttctagtcctgagcttcagatatttctgcctgcaagtctcatgggcagcttaagtttgcctaaaatggattctcccgcttctctaatcctgtcttcctgtgttctcaatcttggctaatttgccaccattcatccacacattgacccacgccagaaatttgaatgcaaatcagaactcataaagtggccatcacagtcagtggagtccccctggatcatcctgtatcctctgcttagtcttacctacttggagcacaatgcaaggcccaacatcttccactgtcttctgagcacttaggcctgagcaagagggctgcccccttgcttccatgtagttagccagtgtatatgcagggccaggcacagagggacgaggtggtacatggatgggtctgcctaactagaggacagtgggtgggctggaactggcatttgaagatactgagagttgtggatcatggaccagaaaagtgctgttctgtgactgtgaagcaagaggaggaagcagatgcatctgagggcaagcatgatgagataacacccccgtgtgtgaggctcaggttagccagtgctgagacctcctgtcgctgggcatccagctgggtgctacggccatggctcctgcctcctgcagccctatcagggcccaaggccttccccgtcagcacttgctccagcctacgcactggagttgtgttctgggtgggtgtgtagaatactcgcactcctacttagggcgtcagggagctctctctaactagcaatttcttctgcacctagggagagcccattgctaaaaaggcccgctcaaatcctcaggtgtacatggacatcaagattgggaacaagccggctggccgcatccagatgctcctgcgttctgatgtcgtgcccatgacagcaggtgagcaggacgctgtggtcagaacggcgggacgctggtggctgagcagtgagcctttcccaggttcttactgcttcacttcttgtgtccttgatattgcttctgacctaagttgatttgaggcatctcagatcctgggatctagtaacagataagtcagagcaggtgtttttgaagctttataagtgctggcttactgttttttaatcgttttttaaaaatacaagtaaataatgtattcttttttttaaagaatagcatatacatatattccaataatatttaagacaataaattgaaaattcattttcccctctctacatccagtcctcaattctagaagtaactagtgcttttattgagtattctttgtaatttattaaatattgacttctattctctttttaatctaaattttattatctagacatataaagagtcaattcagtttcacaaagcttgttttgaaaaaacagtcgtcccctggtgctgtccctgtgccctgctgccaacaccatttgctgctcctcagaggagcggatttcaactcttaggtgttttggtttttatttccatgttgataacagttttatatttctacttcctgttttccattttaaacattatcttctgattttctacttcagagaacaaagaattagttttttaaaatccccttccctgccccctcatcttccctgtataggtaccataattttggttaggtcctaagttattttaacaatgtaagcatcatgtgataacctcctttcatgcacagcattttgttttgcctggaattgataattgccttgtttttgcatagttttctgtgtaatcattcctgattttctcccagaccatcctgctgggggttttgcatccaggtgtctgcatcttgttaaggggagatgagggcaaggctgaattcctcaacattcagtatataaactttcacataatctccatttgtcattatggtacctcagccctcactatgcgtaggatgtcctagtccagagaccctctgctttaacctaccaaagactagacccccagctggctaccaggttggggaggggtggcccccagctgcagagtcagggaaaggatcccaaagattaaccactttcttaaatgggctttcagccaaacttactgtctccaggattacctgcaccctttcctctgagcttttggagtgcaaattgagttgcttcttggcttttaccagcttaagattcagctttctcgggtctgctatatcatttaggactcatctattttgttttctaacttcagaaattttgttgctgttgtctcttcctccctgctttttaagtttattttttggctattttagccactttaaagtgtttgttagcagtaattactctgttcgaaatttttgaatcatcctaaacaaaaccacttattaaaggtacctattaaataataactccccattttctcctccccttagcttctgataacctctaatctttgtgtctatgaattggcctatcctagatttttcatgtaagtggaatcatacaatagctgtccttttccacgccttgttgattttgcatagcataatgctttcaaggttcatccttgtaccatgtatcagtgcctcattcctttttgtggctgaataatattccgttgtatttggataaatatcttgttcattcatttgttgatgggcacttgcacattgttttcaccttttgactattgtaaatgcctgtgtgaatatccacatgtaagtatatgtttaaattcctgttttcaattcttttggatatatatgcctaggaatggaaatgcttagtcatatggtaactctgtatttaactttttgaggaaatgccaaactattttccacagtggctggaccattttacatttctaccagcaatgtatgagtgtttcagtttttccacatcttctctttttttttttttttttttttttttgagacagagtctcgcactgttgcccgggctggagtacagtggcgtgatattggctcactgcaacctccgcctcccaggttcaagtgattcttgtgcctcagcctcccgagtagctgggattacaggcgtctgccaccatgcccagccaattttttgtatttttagtagagacgaggtttcaccatgttggttggccaggctggtctcaaactcctgacctcatgattcgcctgcctcggcctcccatagtgctgggattacaggcgtgagccaccatgcctggcccacatcttctcttaacaggtgtgacatggcatctcattgtggtttttatttttattccctactgactaatgatgttgaacatcttttcatgtgcttgttgaccatttgtatatcttctttggagaaacatcttttcaaatctttggcttatttattaactggattgtttgttttgttttttttaagagacagggtcttgctctgactcccaggctggagtgcagtggtgagaacatggcttactgtagctttgaacccttgacctccagtgatcctcctgccttgacctcccaaagcactgggattacaccgtgcctggccattttgttgttgaattataggagttcattatatattctggatattaaacccatgttaaatatgatttgcaaataagcattctcctgttctgtgggttgctttgccctctattggtacggttctttgatgcacgtcttaaattttgataaaatctaattatttttttctttcacctctgcttttggtgtgacatttaagaaaccatcaccaaatccagagtcatgaagatttgcccctatgttttcttctaagatcctttggtttttcttttaaaaaatcagtttcctaccaatttagtgtggttttaaaagggaacagagctcgaacatgtatattcaatcccccttcaacagaatctcctatagtcctggccaggtgtggtggtttacacctgtaatcccagcactttgggaggccaaggtgggcggatcatctgaggtaggagttctagaccagcttggccaacatagtgaaaccccatctctactaaaaatacaaaattagccaggtgtatggtacatgcctgtagtcccagctactcaagaggctgaggcaggggaatgacttgaacccaagaggtggaagttgcagtgaactgagattgtgccattgcactgcagcatgggcaacaagagtgaaactccgtctcaaggaaaaagaatcccttatagtccttacaaggttagtatcacaaaggtttataatgagtatctcttattttaaaacaaaaatatgaacactaaaccaaagttttttcgaggttttttattttgtcctattttttaaccccagcgctttttcctttctcaattccagagaatttccgctgcctgtgcactcatgaaaagggctttggctttaagggaagcagcttccaccgcatcatcccccagttcatgtgccagggcggtgatttcacaaaccacaatggcactgggggcaagtccatctatgggaagaagttcgatgatgaaaactttatcctcaagcatacgggaccaggtaggagccagttggcatgtggtgacgagggaggctgggcaagggtgggatggccaggcaggatggaaggacaggttgtagttctggctggcggacactaagagtctggaggagacccagccaccagacataggagaaccatgcagccttgctagggtggagttggcttgttgacattcaggtactgttcatcccccaaccgtgtccacaattcctattagccccgcttggattctgtggtctgctgttgcaggctcttatgctctcaaccccactgctctccctgccctcaccatcagatttactcagtaaaatctcggtggttagtcccccagcaactagagaaaaaacacagaattgtactgaacaatcccacttgaaatttataactatagttcttaaggggacccttgccaacctgaccagatttccctacttgatgctcagtcccaaccggagatgatgtgtccatgcccgtcttcacttctgaagccctcatatcatcaccttcccacctcatctaatgcttcacctcctgcatctctccactcgtgcatgctctttcttccaattacaggggatgagctgtctctcctaggccagcctctccacctgtggactggatcctgtccctctcctctacttaggaacatggcttctaaagttgtccccttcttgtaatccatttcccctgctctgctagatcagtccattagcatgaaagcatgcagttatcaacctttaaaaaaaatcttcatccggttgccgggtgcagtggcttagtcctgtaatcccagcattttgggaggcagaggcaggcggatcacctgaggtcaggagttggaggccagcctaactaacatggagaaaccccatctctactaaaaatataaaattagccgggcgtggtggcgcgtgcctgtaatcctagctgctcggaaggctgaggcaggagaatcacttgaacctgggaggcggaggttgtgatgagccaagatcgcaccattgcactccagcctgggcaacaagagcgaaactccgtctcggaaaaaaaaaaacaaacttcatccttgtactcttgttccctctccagctatcacccatgcccctggtcccccatcttttttcaagaagtaaaagcataacttcttgaaaacatggtacagacttgctgccttcgcgttttctctaatcccttctaggcagacttctagtcccatctcgccattgaaaccactcttgccaaaaatacgagtagccagttcttggcgatcatcttatcccacctcccagatgttatcccacctcccaggagcatttcatactacaggttgagtgtccctttcctgaaatgcttgggaccagaagtattttgtattttggaatatttgcattatacttaccagttgagcatcccaaatctgaatatctcaaatctgaaatgctcgagtgagcagttcctttgagtatcatatcagtgctcgtgaagtttcagattttggggcattttggattttggattttcacatttgggatgctcagcctgtactaactctgttctccttgactccttcttcacttggctggcaggactcctgcctcttcttgtctccttttacctagatggctgctttttctgtctttgctgtctccttcttttcctgacccttaaacactgaagtggctcagagcccattctttggttctccagaagcctgttaccctgtgctccgtttttctaactggtggtttgtagggcccctctttactatactgaactgacatgtgtaggtgatatagcccactgacccacatcgttattttaaaaatcagtattcatctgtaactataatagggaagaacatcagaggaaataaacgaatttgtataatactcgaatatgtttccagatgtacatgcttaagcacagctgtgtcagaacacaaagtgaattattcaggcgtctgcccctgtactcaaacgcagcagttagaaatgcagacgggagtgtcaactggataccactaggagtgatgctattggtgatacggctttgtgaaatggtagataaagttgattagagtccaaagtaaagaataatctgtttatttacatagtagttacattcctagaagattccatggaaaatcaaaagcactccaaaactttgggcttatatgtataatggaattatgttttaggtgcagataactgtaaacacattttttacctataccaatatctggcaggatatttgttgttttgttgttgtttggtttttgtttttttgagacagggtctctttctgttgctcaggctggagtgcagtggtgcaagacggctcactgcagcctcaacctctccagctcaagcagtcctgcctcagcctcccaaatagctgggattataggtgcacgccatccataatgccaggctaatttttaagttttttgtagagacagggtttcattatattgctcaggctagtctggaactcttagcttcaagtgatcctcccacttcagcctcccagagtgctgggattacaagcattagccactgcgcccagcctctagcaggatgtttgtaagggccaagaggatatgagacaattcattgtgccagacattgcagaacatctagcattccaggcccccacctgctaaatgccagtagcacccccacaatatttcagacagtcaaaaacactttcaggccaggcacggcggctcatgcctgtaatcccaacactttgggagtctgaagtggcagcccaaagccagaggatcacgtgagttcaggagttcgagaccagcctgggcaacatagtgagaccctatatctactgaaaaaagaataaaaaaattatccaggtgtggtggtgcacgcctgtagtctcagccgcttgggagttgaggtgagaggattgcttgtgccccagagattgaggctacagtgagctgtgatgcactcctgtactcagcctgggtgacagagtgatccccatctcaaaaaaagtaaattcagatttccaaaggtttcctagggacaggacaccaaccccactgagaagcagtgccctaagcagtcacacccggtcccagggctttcagcggtatctctgagttaagtttgtgcagactggcatctgcatgctgatggctccctgagctccagactcctgtccaactgcctgcctgttgtcttcactggatatcccacgagcatctcacactttacatgtctaaaacagctcttggccttctcccctaaactcttcctcctcctcttccctgtttcaataaatgactccaccatccacttagccgcttgatcagaaacttaggagtcattgtggacacacacacacatacatacatgtacacatacacacacagacacacacatatacatgtacattctcttacgtgacaaatgtccatgttaccaggcctcactgtgtcatagctgtcattttgaatggctcttttccactgattgtgagctccaccagagcttggactatgttctgctcatcagtgttcccagggcttaacagggacctggttgtcaagtagacacttaattgttaaataaatgaattaatgaaagaacagaccagtataaagtgattgaaacacctcacttaccatttcactgactattaactgaatccaagataaggtggccgcatttgcatgtgatctgtgcatccccgagtctgagcctgactggctgaagggctgtcaacagcctgcacagacgtcctttaagggctggtagccagggttcggggagctgatggttgttctctccctcaggtctactatccatggccaactctggcccaaacaccaatggctctcagttcttcctgacatgtgacaagacagactggctggatggcaagcatgtggtgtttggagaggtcaccgaaggcctagatgtcttgcggcaaattgaggtatgtggccaggaatgggcctcctccttacccaggccctaggagcacagccctgtgtgagggctggagagtctctgtggcctgagagagatggccaggggctgtgtccagcgggaggggctgctgctgcccaggttccggggtggaagtgggcaaatgggcaggcaggggttggtatccctaaaccactgttagtctccggccttactccctcacttctattctgccacaaaggcccagggcagcaaggacgggaagccaaagcagaaggtgatcatcgccgactgtggggagtacgtgtgaggcggcactctctctgcttccccctccgctcttgaccctgcatatccaggaaggaactgccagcctcagaggaggcagcaccgagggtgcctgtttgaagcaagcagcatttgggatatgtgcccttcctcagggtctgcttggagcagctcctctgcaggcacagcctggactattcccaggcacagctgtgggcccaggagccagctcaggtgctcccctccaccatgggcaggctgtgcaaaaagccactggcttttctcagcatttgctgctgggcctctcctgggactaccagtgtggctcttacgtgttttctttgctaaaataaaccctagttcttatattgctcttcctgctagttcttgggagttgtcagagattgtgtctgtggctaagctggacctctgaggcaggctggtgagtggggagagcagagcatctttttcacagctttcatttcctcccttgggccgatccccttagatgtcaggtgatgtatcttcacaccaggcatcgatgtcagggcaacggaaattaaagactggaaagctccggtcttctgctgcctctgctcctaaacccagctgccggccttacagccagcaagtgtactctcagtggttcatttgtttatttgttcactttcaccctacagattttaaaaaatgaaatttttataactcaaagtgccttctctgtgccaagtactatgcctatttgtcaggagacaggaagccaacaaactacatgtgcctaatccagcccactgcctgtttttatgaatcaggttttattggaacacagccacgtccatttatttacatattgtccatggtggtttcttactgcagtggcagaggtgcgtaaggggctatagacacaatacaggctatggtccctgtattagggttttctagagaagcagaaccaatagggtgtgtatatatgtagaaagagatttattttaaggaactggctcaagcagtggtaggagctggcaagtctgcaatctgcacaacagaccagcaggctggagactcaggaaaaaaactgatgttgcagttcagctctgaggcagtttggaagcagaattcttcctccagtgatctcagtcttttttctcttaagaatttcaactgattggatgaggcctacccacattatggagggtaatctgctttactctctactgacttaaatattaatccatctaaaaaataggccaggcatggtggctcatgcctataattccaccactattgggaggctgaggcaggaggatcacttgagcccaggagttcaagaccagcctgggcaatgtagagacccccatctctagggggagaaaaaaaagccaggtatggtagtgcacacctatagtcccagctactcagaaggctgaggtgggaggatcgcttgaacctgggaggttgaggctgcagtcagccatggtcatgccactgtactccagcctgggtgacaagagggagaccctgtcttgaaaaaaagaaaccatcatcacagcaacatctagactagtgtttgactaaaaactggataccatggcctagccaaattgacacacaaaatagaccatcacagtcccaaggcctaaaatacttactatctgagcctttacaaaacaggattgccagccactgaagagaacaaatggtcccaccccctgctgagctcacagtctggctctcctgtgtgcagccacttcttggagctggcttctctccactccccctccagatgctggtcagccaggcggttataaagaatctcatctgctgaaggcttttagcagggactgagtcctgtagctgttggacacctcctgtgggttgggtcactcagaccattcagaatccactgagctgagcttttgcatcttggattgagatctggatgagccaggaggcaggagaggctaggtggtcctcatgaccctaggatagctcttgctgagggatggtggcattctgccctacctctggctcccatgtgccgactggactttgtgagctccagctgctacagttgactgagttcaggctccatgtagctgggatatactacatggttacccctcacccctatggagcttccaaaagagaccctccctcaaagcacagccccttctctgagtgcaaataatggccatcagaggtcagtcacaggtgttaggcaggcatctatgaagctggggatgatagcactgacttcagtgcttggacgagaaccaggagagagtgtgtagaaaaagcacagccagcctcccataaaaggacagactcctgtgacaaccttgtcactctgttcctccctgatactctggggaggtggaggccagtgggcagttctgaaagctcagcaggtttggagccattgggtgtggactcctctcccagtgttcctcctgggtgttcacagatgttattgaatgcacactggaaccctgcacaggtaaactgaggctttattggcgtgactgccaaaggtcacacagggtggtttggcagagctgggattagaagcccagcctgtctctcttcagtagtaatggagtcctgggaggtttactaggctttagcctcaatctgtggcggcagggtccacagccctggggagtgacacagtcatggtccccatgattggccaggacctgtgtggagagacacaggagacaagaccctgctcttccaggccagaagggaggggagccccagagctgggcagtggcatgccccacagcctggccacctgcttcggctacgcaccatgcagcagctgcacctggctgcctcgggaaaactctgacctctctgggaagtggagccagtggctctgtgggcgtcctttcctgcagcctggagagcaaagcggctttccctgggactgtgtggctcctgtcccaactggcctccccattccacattcccattgctggaccagcaccaggactgggcacagggcttccttttgctgattcatttcccccctaactcattcagagttgagccccatctgagtccccacatgctggccctgaaacggttacaaaggctgaaaccagggatggcaggcccaggatcagtgctgtggctgttggagtgtcctctccaacagcatgacagccgcctccaggtgctcccagcatctgttgcagtcatggcagcctcacggcaacctctgaagaaggaattatagaaccaactttttattgttgaaaatggagtcttgtagagttcagtgatgggaaactaaagtagaaaaagcacatcacaaagaaacatatatagtacagtgtgatcccaattttgtaaaaatatctgtaatatgtaagcataggtatttgtatatcttaagaaaaaaagcctagaaataaagccacaaaaatattaatagtgtgtttatttgacttgtgggactgtagtgatttgaattgtattttattttttatatatcccactttcctccaaaactgcattatttttttgagaagtgaaagacatttttgaaaaagggggtcaagtgcccatccagggttcctttcaaaaagggggccaagcagttgacctggatgggcagttcccccatgcaaattgccacccaagacacctggtgggtacagacctctctcagcaggacatgggatcccattgtctgggaacacagcaaagtttcacagccgctgccacaagtgacacttgctaggcctttaaaggctataagaatacaagtcccgccctctgagggatgccatgtgtagatggtttaggaaagagcacagctctgaaataaatacatcatcacctgcagaacacattttggtttaatggacagacatagaagtggctcaaaaataagcaaattcatttgtaataataccagcaaatacctattgttaagcatttatatgtcagacatcccaaagatttgtgtacatatttagtctttataatagctttgggaggaaagaaccaatatcatactctacaaaggaagaagcagaaccaggattcaaatctatttggcaccaaaaatctgcctcttgctacactgcctctattcctgtttctttggaccttttccagaacatgttacttccctgcctcagttagaagttagtgactacgaatcccctgctgacttggcctcaaggccagtattgcaccgcaaggaccaagactgctgggcattcctcttttgcctgttgtatgcgtcctctcttcctgtcaactgtcattgatttctcattgctgtcagtagatctgaaacaaccaccaccatcatccttccaaccctcatctggtgcaacgagataaacaggccatgccctgagcaaagaaaagggaaatggtggtatctgtgctgccagcctgggccacccactgcagatgcacatgcttggctcagcaaacggataaggattaaattcatggactttgtgttcattcacaattgtttcattgctcaagggatttttctattttatttcatttggtgactatctggatgataaaagttgctgaaagtctgatggccaactaggtagacaaagccttatgtttttccattgttctgtatgaaccaggaggatcacggctcgtattggttcctgctatgcacagcttgattaatgggtaaggtgtactccatatctacaaaccttcaggtagtttacagacattcttggtgcacccctaactatgccagatcattggctgggcactaaagatacaggtggagtaaaaaattaattgtcaaaataactggctaatttaaaatttacaattgcctagaagaccatctttgatgttaagaaggaacaattaagtaaatactaggatggcaaacaggttccataatttcattttgttgagacaacagttttgctcatgtcaccaggctgaagtgcaatgttgtgatctctgctcactgcaacctccacctcccaggttcaagcaattctgcctcagcctcctgagtagctgggattataggcatgcaccaccatgcccaggtaatcttgtatttttagtacagatggggtttcactgtgttggccaggatggtcttgaactcctgacttcaggtgatctgcctgccttggcctcccaaagtgctggggttataggtgtgagccaccatgc

SEQ ID NO: 1520 - DNA, 19633 bp, Homo sapiens
gcgcgcgagcaagatggccaccaccaagcgcgtcttgtacgtgggtgagcaggaggggttgctaggcggagtctgagtgaacgcgacccccaagggtcggggcgtggggtgggacgcatctctgaaccaggaggacggcgagctgctgtcaaggccgggtctctggcggtagtgctggcgatagctctggctgtgcttaaactccttccaaggtttcccactgtcctcaggaaaaagtgcagacttcttagcagtacgcacttctccagcttctttgctttgcttcccgattcgctgggtctcccgaaaaatgacccacttgcccccaaggttcaggttatttcacacctttgggcctctgcttttgcgactcccttgcagtgaacagccttgccacacacctcaggtgcgtgaacccgagacggaatgattattctgacttcctagcccgctgagctccagcgggccccgaggagcggtaaaggagtattatggcccttcggatcctctcgttcatttgttttacaaacattcagtgcagcgacggctcagccccagcccctgccataaaggaaggagttcccagactagccagaaaaaaagtggaattacctcagtagcacacttttgataagcgctgtagtgaggatggatcatgataatatgggcctggctgcgggacaaatgacccatccatctggagaagcgagggcaaattctggatgcggcgatgccagagctgatgagcaggagttagctacgtaaccgaagcagaggcaaggccgttcactgcaagggagtcgcaaaggtgtgaaatagcctgacacttgggggcaagtgggtcattattcgggagacccaggaaattaggaagcaaagcaaaaaagctggagaggtgggtactgctaaggagtttgcactttatcctgaggacagtgggaagcctttgaaggagtgtaagcgaaaagttacgggttcaaatttgcattttcctaagatcattctagttggctttgtggagttgatggaatggaggcagggaggtcagttgtgaagctattgcagtaatcccaggactagatgagagtctgaaagaagggcgaagagaggaatatttttcataagtatgggtgggcagagatgagagggggatgtttgtttacccaaagaactgaatggaagggtcctgtcccctggctagcatgctaactgggctgcaaggacttctgcaagagtatggagatcagtggctcagaaggcccttggcttatttgcaggtggactggcagaggaagtggacgacaaagttcttcatgctgcgttcattccttttggagacatcacagatattcagattcctctggattatgaaacaggtgagttagtgtctctcacgttcagaatcctcttactaggaaaataccttaaaaaattaaagtcacatcacaattctaaatatgcattctaaatatggttagtatacactacaggtaagttcaggaaggtgtctggtgacagtgatctcgatggagaaggaatgttctgaggccatgtggttgtgaactctgaatactttccagagtcttcagctgttgggttgagataagacagatttttcaatagaccagtagggagataggtttgaactacattgagatttgaatgttgttttaatctacctgatgggtaccccatcccacctgcaccttcttgcagctgtgctattaaatgaggcagcgggaaagcctagccccataatgggggtgggtgagggcgggggttcttggcctctgcacccctgggtgggtttcccatcgattggtatcacaaccacagttcagttttctgtttacctttgttgtcatttttaagattatagttttaggcctagttttatcatcaaccttgcatatgattgttagcaaagtctttaaactctctgggcctgggaaatctttatttgcaaaatgataaggttatgttggctttctaagggccttctagtctctgagttctatgataaacattattgtgcttggtctttctagttagttcagcattttcctgaagataaagactgagcatctttatcaggttttaggattcatgctttatgcacagttgatgcgcaaaatatatatttagatagataattgataggtcaaatgactttatttttctaattgctttgcatgcaatggttaaggttttaagtttggctttcgtagaataattgaatacttatcaattaaaaatacagtttactattcagctatgtccattaaaaaaacaaagtttattattgcttaaaatattgtataagaagaatcaagaatgagattccttcttcctaaatagtgattggatagaacttctggtgtttggatacgacatgtaactgacttcactttgtgaccatcctgtttcttcccactaccccacatagtaattacttgtttttgtttttccattttgtagaaaagcaccgaggatttgcttttgttgaatttgagttggcagaggtgagagtctgtgttactagtgtctagtccttggtttgtgatgttgttactgattacaaaggaagcttttcaccatttggttaggtttttgggccttaggctgatgcttccagagagatcagaagtaagtgctgttctaaggaaagcgtctctcacataatcagactggactgtgaataacatgtcagacctgccaggccctcccattcttgccctgcagaggagctagctcatgcacccctgttcattgagcattcttgcctggaagtagtgattatttcttgtgccttcaactagatggcaaattgttgcaccaccagctctaaaatcagccaggaagtgctctttgttagaaacacacaaaacctaggcaagaaatacagaggtggcatttttctggatttttgctactgagcatgtgtttagacaccataagaagcatttggctgcaagcctaaacttgtacctttgtctttccttggcaggatgctgcagcagctatcgacaacatggtatggctgggaatcttaattctaactaaagttgctttttggtggtacagaggctccttattcatatatcagtgttctggacttccaaagttacaaggttgcatggggaggtaaaaattctcacatgaaaatattcactgtgaattgatcacttataaaattagttcttactcagactccttcgccatttcagaataatgtaagtcctcatcatccttgttgaccagtctctcactggctctcccatgtttaggataatttgcagacacagtgcaaattgattgcacggtgtaactgcatattttgcaaaatagcaggatttcatgaagtgttagaccaatttacaattgagaagagaaatttaattatggcaggtgcaaatcactgatacaaatgatttggatattctggaaaggtccttgggaaaaatgatgatgctctttagtatttgtgccttccttgagatccttttagttttcatgtctgataagaagtgcaaagataccatactgttgatagaattttgttggaaaaataatacttcagtgcctgttacttttctttccttctttttttttttttttttttttaacaatcttgaactcatgagttcaagacttctcagcttctcaagtagctggaattacaggctcaagccaacagggctacctgggctacctgttacatttctttctaccaagttacatttctttctaccgattagtgcatagttagtcctgaatattaatggtaagaaacttgtttttattatttttagtttcatcacagtaatttcccagtcagccttttaaaatttttcaattttaccacgaaatcttcatcaccacttcaagtggagtcaccttaaatgacctttcctggtaccgattatctttggataatgagatgttgttttatttgttgttctgttatccattcaccaaacatattcatcagctgtcagagatcatttttctttcatttcaaagcttatcttgacttttgaaggtgaactcaaatactgggaaactgcatttatttttgtaattttggagtgttctgaacccagagttacttttggtaatacaggtctttgtgtgctgctatgaaagaaaggggtgtgagttccctgaaacccacaggtggctttggggtggctgcatagcttactggtagaggcccagggattaagggaggacaaatcatgagtgtgtctcagaagtatatggaaagctggctggccctcttttaacctaagagagtttaagcagctggattttcaatcttttcagaatgaatctgagctttttggacgtacaattcgtgtcaatttggccaaaccaatgagaattaaggaaggctcttccaggccaggtgagtaggagcaacttccagattccctgtgatgttctgcagtttggccttagttgcattttttgtctctatttacttggaagtagatgctaaatgctgcttcctggtagataggagtagatgatggttcacattgggaagggcatgcaccacctttttagagaaacaagtgagtttgagcttctcagcaaagccaaagtgattgtttctgttatgagagaaattcctgcctgagctcatctttcccagttttcttgatattccattcctggggtctccatcaagggctgaaatcagcaaaggctacacctttgctttcggcatagctattttccttagccctactgagagctggacttcagggcctacattctggatgggaactttccttacccctgggagttctcagtggggaattgtctggcatacaggccacatagcatcttccactttgctgaccaaagcagctacttttcagttcaagctgacagcttgaatgaacatttgtttgattctttcctttcagtttggtcagatgatgactggttgaagaagttttctgggaagacgcttgaagagaataaagaggaagaagggtcagagcctcccaaagcagagacccaggaggtgagaatgaagctcctgcttccagagcacaggccggcgctgtccacaggagacttttttttttaagttttaatggaaatttgccaatatgtatatcaaagtggagggaatgaataatgaattcttagtactttggtaaagtcaatattgagttcttagtactttggtaaagtcaatatcgagtgaattcaagggcgaaactttgggtctcttgtccatgttgtgttctatgtgatgagtgtctcagctctgctcaggtatggatttgtgattatcaactgacagggaggaagctgaggtgcccctcttcacccctcctgatcagtccccctccttcactgaagagtttgccacaagggtcgtggtcttcctattcctgtgctaatggaggggagacagaatagggtagtgtcccttccttcaacctgtacatgggttcagggttctccagtcctacgggaacctgctggggcacttccccctgattctcagcatagtctctgacagttgcttcctgggcgtcccctcctctgagtactttgtgaatgttgtcattcttctgtatttctttcttggctcatggtttctctctcttctctcagctgaaacagtagcagtctatctctagttttatgcagcctctgttatgctgttgatcttcatggtctctttctagtcctgagcttcagatatttctgcctgcaagtctcatgggcagcttaagtttgcctaaaatggattctcccgcttctctaatcctgtcttcctgtgttctcaatcttggctaatttgccaccattcatccacacattgacccacgccagaaatttgaatgcaaatcagaactcataaagtggccatcacagtcagtggagtccccctggatcatcctgtatcctctgcttagtcttacctacttggagcacaatgcaaggcccaacatcttccactgtcttctgagcacttaggcctgagcaagagggctgcccccttgcttccatgtagttagccagtgtatatgcagggccaggcacagagggacgaggtggtacatggatgggtctgcctaactagaggacagtgggtgggctggaactggcatttgaagatactgagagttgtggatcatggaccagaaaagtgctgttctgtgactgtgaagcaagaggaggaagcagatgcatctgagggcaagcatgatgagataacacccccgtgtgtgaggctcaggttagccagtgctgagacctcctgtcgctgggcatccagctgggtgctacggccatggctcctgcctcctgcagccctatcagggcccaaggccttccccgtcagcacttgctccagcctacgcactggagttgtgttctgggtgggtgtgtagaatactcgcactcctacttagggcgtcagggagctctctctaactagcaatttcttctgcacctagggagagcccattgctaaaaaggcccgctcaaatcctcaggtgtacatggacatcaagattgggaacaagccggctggccgcatccagatgctcctgcgttctgatgtcgtgcccatgacagcaggtgagcaggacgctgtggtcagaacggcgggacgctggtggctgagcagtgagcctttcccaggttcttactgcttcacttcttgtgtccttgatattgcttctgacctaagttgatttgaggcatctcagatcctgggatctagtaacagataagtcagagcaggtgtttttgaagctttataagtgctggcttactgttttttaatcgttttttaaaaatacaagtaaataatgtattcttttttttaaagaatagcatatacatatattccaataatatttaagacaataaattgaaaattcattttcccctctctacatccagtcctcaattctagaagtaactagtgcttttattgagtattctttgtaatttattaaatattgacttctattctctttttaatctaaattttattatctagacatataaagagtcaattcagtttcacaaagcttgttttgaaaaaacagtcgtcccctggtgctgtccctgtgccctgctgccaacaccatttgctgctcctcagaggagcggatttcaactcttaggtgttttggtttttatttccatgttgataacagttttatatttctacttcctgttttccattttaaacattatcttctgattttctacttcagagaacaaagaattagttttttaaaatccccttccctgccccctcatcttccctgtataggtaccataattttggttaggtcctaagttattttaacaatgtaagcatcatgtgataacctcctttcatgcacagcattttgttttgcctggaattgataattgccttgtttttgcatagttttctgtgtaatcattcctgattttctcccagaccatcctgctgggggttttgcatccaggtgtctgcatcttgttaaggggagatgagggcaaggctgaattcctcaacattcagtatataaactttcacataatctccatttgtcattatggtacctcagccctcactatgcgtaggatgtcctagtccagagaccctctgctttaacctaccaaagactagacccccagctggctaccaggttggggaggggtggcccccagctgcagagtcagggaaaggatcccaaagattaaccactttcttaaatgggctttcagccaaacttactgtctccaggattacctgcaccctttcctctgagcttttggagtgcaaattgagttgcttcttggcttttaccagcttaagattcagctttctcgggtctgctatatcatttaggactcatctattttgttttctaacttcagaaattttgttgctgttgtctcttcctccctgctttttaagtttattttttggctattttagccactttaaagtgtttgttagcagtaattactctgttcgaaatttttgaatcatcctaaacaaaaccacttattaaaggtacctattaaataataactccccattttctcctccccttagcttctgataacctctaatctttgtgtctatgaattggcctatcctagatttttcatgtaagtggaatcatacaatagctgtccttttccacgccttgttgattttgcatagcataatgctttcaaggttcatccttgtaccatgtatcagtgcctcattcctttttgtggctgaataatattccgttgtatttggataaatatcttgttcattcatttgttgatgggcacttgcacattgttttcaccttttgactattgtaaatgcctgtgtgaatatccacatgtaagtatatgtttaaattcctgttttcaattcttttggatatatatgcctaggaatggaaatgcttagtcatatggtaactctgtatttaactttttgaggaaatgccaaactattttccacagtggctggaccattttacatttctaccagcaatgtatgagtgtttcagtttttccacatcttctctttttttttttttttttttttttttgagacagagtctcgcactgttgcccgggctggagtacagtggcgtgatattggctcactgcaacctccgcctcccaggttcaagtgattcttgtgcctcagcctcccgagtagctgggattacaggcgtctgccaccatgcccagccaattttttgtatttttagtagagacgaggtttcaccatgttggttggccaggctggtctcaaactcctgacctcatgattcgcctgcctcggcctcccatagtgctgggattacaggcgtgagccaccatgcctggcccacatcttctcttaacaggtgtgacatggcatctcattgtggtttttatttttattccctactgactaatgatgttgaacatcttttcatgtgcttgttgaccatttgtatatcttctttggagaaacatcttttcaaatctttggcttatttattaactggattgtttgttttgttttttttaagagacagggtcttgctctgactcccaggctggagtgcagtggtgagaacatggcttactgtagctttgaacccttgacctccagtgatcctcctgccttgacctcccaaagcactgggattacaccgtgcctggccattttgttgttgaattataggagttcattatatattctggatattaaacccatgttaaatatgatttgcaaataagcattctcctgttctgtgggttgctttgccctctattggtacggttctttgatgcacgtcttaaattttgataaaatctaattatttttttctttcacctctgcttttggtgtgacatttaagaaaccatcaccaaatccagagtcatgaagatttgcccctatgttttcttctaagatcctttggtttttcttttaaaaaatcagtttcctaccaatttagtgtggttttaaaagggaacagagctcgaacatgtatattcaatcccccttcaacagaatctcctatagtcctggccaggtgtggtggtttacacctgtaatcccagcactttgggaggccaaggtgggcggatcatctgaggtaggagttctagaccagcttggccaacatagtgaaaccccatctctactaaaaatacaaaattagccaggtgtatggtacatgcctgtagtcccagctactcaagaggctgaggcaggggaatgacttgaacccaagaggtggaagttgcagtgaactgagattgtgccattgcactgcagcatgggcaacaagagtgaaactccgtctcaaggaaaaagaatcccttatagtccttacaaggttagtatcacaaaggtttataatgagtatctcttattttaaaacaaaaatatgaacactaaaccaaagttttttcgaggttttttattttgtcctattttttaaccccagcgctttttcctttctcaattccagagaatttccgctgcctgtgcactcatgaaaagggctttggctttaagggaagcagcttccaccgcatcatcccccagttcatgtgccagggcggtgatttcacaaaccacaatggcactgggggcaagtccatctatgggaagaagttcgatgatgaaaactttatcctcaagcatacgggaccaggtaggagccagttggcatgtggtgacgagggaggctgggcaagggtgggatggccaggcaggatggaaggacaggttgtagttctggctggcggacactaagagtctggaggagacccagccaccagacataggagaaccatgcagccttgctagggtggagttggcttgttgacattcaggtactgttcatcccccaaccgtgtccacaattcctattagccccgcttggattctgtggtctgctgttgcaggctcttatgctctcaaccccactgctctccctgccctcaccatcagatttactcagtaaaatctcggtggttagtcccccagcaactagagaaaaaacacagaattgtactgaacaatcccacttgaaatttataactatagttcttaaggggacccttgccaacctgaccagatttccctacttgatgctcagtcccaaccggagatgatgtgtccatgcccgtcttcacttctgaagccctcatatcatcaccttcccacctcatctaatgcttcacctcctgcatctctccactcgtgcatgctctttcttccaattacaggggatgagctgtctctcctaggccagcctctccacctgtggactggatcctgtccctctcctctacttaggaacatggcttctaaagttgtccccttcttgtaatccatttcccctgctctgctagatcagtccattagcatgaaagcatgcagttatcaacctttaaaaaaaatcttcatccggttgccgggtgcagtggcttagtcctgtaatcccagcattttgggaggcagaggcaggcggatcacctgaggtcaggagttggaggccagcctaactaacatggagaaaccccatctctactaaaaatataaaattagccgggcttggtgggcgcgtgcctgttatcctagctgctcgaaaggctgaggcaggagaatcacttgaacctgggaggcggaggttgtgatgagccaagatcgcaccattgcactccagcctgggcaacaagagcgaaactccgtctcggaaaaaaaaaaacaaacttcatccttgtactcttgttccctctccagctatcacccatgcccctggtcccccatcttttttcaagaagtaaaagcataacttcttgaaaacatggtacagacttgctgccttcgcgttttctctaatcccttctaggcagacttctagtcccatctcgccattgaaaccactcttgccaaaaatacgagtagccagttcttggcgatcatcttatcccacctcccagatgttatcccacctcccaggagcatttcatactacaggttgagtgtccctttcctgaaatgcttgggaccagaagtattttgtattttggaatatttgcattatacttaccagttgagcatcccaaatctgaatatctcaaatctgaaatgctcgagtgagcagttcctttgagtatcatatcagtgctcgtgaagtttcagattttggggcattttggattttggattttcacatttgggatgctcagcctgtactaactctgttctccttgactccttcttcacttggctggcaggactcctgcctcttcttgtctccttttacctagatggctgctttttctgtctttgctgtctccttcttttcctgacccttaaacactgaagtggctcagagcccattctttggttctccagaagcctgttaccctgtgctccgtttttctaactggtggtttgtagggcccctctttactatactgaactgacatgtgtaggtgatatagcccactgacccacatcgttattttaaaaatcagtattcatctgtaactataatagggaagaacatcagaggaaataaacgaatttgtataatactcgaatatgtttccagatgtacatgcttaagcacagctgtgtcagaacacaaagtgaattattcaggcgtctgcccctgtactcaaacgcagcagttagaaatgcagacgggagtgtcaactggataccactaggagtgatgctattggtgatacggctttgtgaaatggtagataaagttgattagagtccaaagtaaagaataatctgtttatttacatagtagttacattcctagaagattccatggaaaatcaaaagcactccaaaactttgggcttatatgtataatggaattatgttttaggtgcagataactgtaaacacattttttacctataccaatatctggcaggatatttgttgttttgttgttgtttggtttttgttttttttgagacagggtctctttctgttgctcaggctggagtgcagtggtgcaagacggctcactgcagcctcaacctctccagctcaagcagtcctgcctcagcctcccaaatagctgggattataggtgcacgccatccataatgccaggctaatttttaagttttttgtagagacagggtttcattatattgctcaggctagtctggaactcttagcttcaagtgatcctcccacttcagcctcccagagtgctgggattacaagcattagccactgcgcccagcctctagcaggatgtttgtaagggccaagaggatatgagacaattcattgtgccagacattgcagaacatctagcattccaggcccccacctgctaaatgccagtagcacccccacaatatttcagacagtcaaaaacactttcaggccaggcacggcggctcatgcctgtaatcccaacactttgggagtctgaagtggcagcccaaagccagaggatcacgtgagttcaggagttcgagaccagcctgggcaacatagtgagaccctatatctactgaaaaaagaataaaaaaattatccaggtgtggtggtgcacgcctgtagtctcagccgcttgggagttgaggtgagaggattgcttgtgccccagagattgaggctacagtgagctgtgatgcactcctgtactcagcctgggtgacagagtgatccccatctcaaaaaaagtaaattcagatttccaaaggtttcctagggacaggacaccaaccccactgagaagcagtgccctaagcagtcacacccggtcccagggctttcagcggtatctctgagttaagtttgtgcagactggcatctgcatgctgatggctccctgagctccagactcctgtccaactgcctgcctgttgtcttcactggatatcccacgagcatctcacactttacatgtctaaaacagctcttggccttctcccctaaactcttcctcctcctcttccctgtttcaataaatgactccaccatccacttagccgcttgatcagaaacttaggagtcattgtggacacacacacacatacatacatgtacacatacacacacagacacacacatatacatgtacattctcttacgtgacaaatgtccatgttaccaggcctcactgtgtcatagctgtcattttgaatggctcttttccactgattgtgagctccaccagagcttggactatgttctgctcatcagtgttcccagggcttaacagggacctggttgtcaagtagacacttaattgttaaataaatgaattaatgaaagaacagaccagtataaagtgattgaaacacctcacttaccatttcactgactattaactgaatccaagataaggtggccgcatttgcatgtgatctgtgcatccccgagtctgagcctgactggctgaagggctgtcaacagcctgcacagacgtcctttaagggctggtagccagggttcggggagctgatggttgttctctccctcaggtctactatccatggccaactctggcccaaacaccaatggctctcagttcttcctgacatgtgacaagacagactggctggatggcaagcatgtggtgtttggagaggtcaccgaaggcctagatgtcttgcggcaaattgaggtatgtggccaggaatgggcctcctccttacccaggccctaggagcacagccctgtgtgagggctggagagtctctgtggcctgagagagatggccaggggctgtgtccagcgggaggggctgctgctgcccaggttccggggtggaagtgggcaaatgggcaggcaggggttggtatccctaaaccactgttagtctccggccttactccctcacttctattctgccacaaaggcccagggcagcaaggacgggaagccaaagcagaaggtgatcatcgccgactgtggggagtacgtgtgaggcggcactctctctgcttccccctccgctcttgaccctgcatatccaggaaggaactgccagcctcagaggaggcagcaccgagggtgcctgtttgaagcaagcagcatttgggatatgtgcccttcctcagggtctgcttggagcagctcctctgcaggcacagcctggactattcccaggcacagctgtgggcccaggagccagctcaggtgctcccctccaccatgggcaggctgtgcaaaaagccactggcttttctcagcatttgctgctgggcctctcctgggactaccagtgtggctcttacgtgttttctttgctaaaataaaccctagttcttatattgctcttcctgctagttcttgggagttgtcagagattgtgtctgtggctaagctggacctctgaggcaggctggtgagtggggagagcagagcatctttttcacagctttcatttcctcccttgggccgatccccttagatgtcaggtgatgtatcttcacaccaggcatcgatgtcagggcaacggaaattaaagactggaaagctccggtcttctgctgcctctgctcctaaacccagctgccggccttacagccagcaagtgtactctcagtggttcatttgtttatttgttcactttcaccctacagattttaaaaaatgaaatttttataactcaaagtgccttctctgtgccaagtactatgcctatttgtcaggagacaggaagccaacaaactacatgtgcctaatccagcccactgcctgtttttatgaatcaggttttattggaacacagccacgtccatttatttacatattgtccatggtggtttcttactgcagtggcagaggtgcgtaaggggctatagacacaatacaggctatggtccctgtattagggttttctagagaagcagaaccaatagggtgtgtatatatgtagaaagagatttattttaaggaactggctcaagcagtggtaggagctggcaagtctgcaatctgcacaacagaccagcaggctggagactcaggaaaaaaactgatgttgcagttcagctctgaggcagtttggaagcagaattcttcctccagtgatctcagtcttttttctcttaagaatttcaactgattggatgaggcctacccacattatggagggtaatctgctttactctctactgacttaaatattaatccatctaaaaaataggccaggcatggtggctcatgcctataattccaccactattgggaggctgaggcaggaggatcacttgagcccaggagttcaagaccagcctgggcaatgtagagacccccatctctagggggagaaaaaaaagccaggtatggtagtgcacacctatagtcccagctactcagaaggctgaggtgggaggatcgcttgaacctgggaggttgaggctgcagtcagccatggtcatgccactgtactccagcctgggtgacaagagggagaccctgtcttgaaaaaaagaaaccatcatcacagcaacatctagactagtgtttgactaaaaactggataccatggcctagccaaattgacacacaaaatagaccatcacagtcccaaggcctaaaatacttactatctgagcctttacaaaacaggattgccagccactgaagagaacaaatggtcccaccccctgctgagctcacagtctggctctcctgtgtgcagccacttcttggagctggcttctctccactccccctccagatgctggtcagccaggcggttataaagaatctcatctgctgaaggcttttagcagggactgagtcctgtagctgttggacacctcctgtgggttgggtcactcagaccattcagaatccactgagctgagcttttgcatcttggattgagatctggatgagccaggaggcaggagaggctaggtggtcctcatgaccctaggatagctcttgctgagggatggtggcattctgccctacctctggctcccatgtgccgactggactttgtgagctccagctgctacagttgactgagttcaggctccatgtagctgggatatactacatggttacccctcacccctatggagcttccaaaagagaccctccctcaaagcacagccccttctctgagtgcaaataatggccatcagaggtcagtcacaggtgttaggcaggcatctatgaagctggggatgatagcactgacttcagtgcttggacgagaaccaggagagagtgtgtagaaaaagcacagccagcctcccataaaaggacagactcctgtgacaaccttgtcactctgttcctccctgatactctggggaggtggaggccagtgggcagttctgaaagctcagcaggtttggagccattgggtgtggactcctctcccagtgttcctcctgggtgttcacagatgttattgaatgcacactggaaccctgcacaggtaaactgaggctttattggcgtgactgccaaaggtcacacagggtggtttggcagagctgggattagaagcccagcctgtctctcttcagtagtaatggagtcctgggaggtttactaggctttagcctcaatctgtggcggcagggtccacagccctggggagtgacacagtcatggtccccatgattggccaggacctgtgtggagagacacaggagacaagaccctgctcttccaggccagaagggaggggagccccagagctgggcagtggcatgccccacagcctggccacctgcttcggctacgcaccatgcagcagctgcacctggctgcctcgggaaaactctgacctctctgggaagtggagccagtggctctgtgggcgtcctttcctgcagcctggagagcaaagcggctttccctgggactgtgtggctcctgtcccaactggcctccccattccacattcccattgctggaccagcaccaggactgggcacagggcttccttttgctgattcatttcccccctaactcattcagagttgagccccatctgagtccccacatgctggccctgaaacggttacaaaggctgaaaccagggatggcaggcccaggatcagtgctgtggctgttggagtgtcctctccaacagcatgacagccgcctccaggtgctcccagcatctgttgcagtcatggcagcctcacggcaacctctgaagaaggaattatagaaccaactttttattgttgaaaatggagtcttgtagagttcagtgatgggaaactaaagtagaaaaagcacatcacaaagaaacatatatagtacagtgtgatcccaattttgtaaaaatatctgtaatatgtaagcataggtatttgtatatcttaagaaaaaaagcctagaaataaagccacaaaaatattaatagtgtgtttatttgacttgtgggactgtagtgatttgaattgtattttattttttatatatcccactttcctccaaaactgcattatttttttgagaagtgaaagacatttttgaaaaagggggtcaagtgcccatccagggttcctttcaaaaagggggccaagcagttgacctggatgggcagttcccccatgcaaattgccacccaagacacctggtgggtacagacctctctcagcaggacatgggatcccattgtctgggaacacagcaaagtttcacagccgctgccacaagtgacacttgctaggcctttaaaggctataagaatacaagtcccgccctctgagggatgccatgtgtagatggtttaggaaagagcacagctctgaaataaatacatcatcacctgcagaacacattttggtttaatggacagacatagaagtggctcaaaaataagcaaattcatttgtaataataccagcaaatacctattgttaagcatttatatgtcagacatcccaaagatttgtgtacatatttagtctttataatagctttgggaggaaagaaccaatatcatactctacaaaggaagaagcagaaccaggattcaaatctatttggcaccaaaaatctgcctcttgctacactgcctctattcctgtttctttggaccttttccagaacatgttacttccctgcctcagttagaagttagtgactacgaatcccctgctgacttggcctcaaggccagtattgcaccgcaaggaccaagactgctgggcattcctcttttgcctgttgtatgcgtcctctcttcctgtcaactgtcattgatttctcattgctgtcagtagatctgaaacaaccaccaccatcatccttccaaccctcatctggtgcaacgagataaacaggccatgccctgagcaaagaaaagggaaatggtggtatctgtgctgccagcctgggccacccactgcagatgcacatgcttggctcagcaaacggataaggattaaattcatggactttgtgttcattcacaattgtttcattgctcaagggatttttctattttatttcatttggtgactatctggatgataaaagttgctgaaagtctgatggccaactaggtagacaaagccttatgtttttccattgttctgtatgaaccaggaggatcacggctcgtattggttcctgctatgcacagcttgattaatgggtaaggtgtactccatatctacaaaccttcaggtagtttacagacattcttggtgcacccctaactatgccagatcattggctgggcactaaagatacaggtggagtaaaaaattaattgtcaaaataactggctaatttaaaatttacaattgcctagaagaccatctttgatgttaagaaggaacaattaagtaaatactaggatggcaaacaggttccataatttcattttgttgagacaacagttttgctcatgtcaccaggctgaagtgcaatgttgtgatctctgctcactgcaacctccacctcccaggttcaagcaattctgcctcagcctcctgagtagctgggattataggcatgcaccaccatgcccaggtaatcttgtatttttagtacagacggggtttcactgtgttggccaggatggtcttgaactcctgacttcaggtgatctgcctgccttggcctcccaaagtgctggggttataggtgtgagccaccatgc

SEQ ID NO: 1521 - DNA, 314 bp, Homo sapiens
aaaaaaaaaattagctgggcatggtgacgtgcacctgtactcccagctgctactcgggaggctaaggtgggaggatcatttgaggctgggaggttgaggctgcagtgaaccatgatcatgtcactgccttccagcctgggtaagagagcaagaccctgtctcaaagaaaaaaagaaaaaaaaaatcaccctggacaagtggattggaggaacagagccactatcaactcttccttagtctactacattaacttcctggtctcctgggttccaatcaacccatcctgggcctagtgtcagagcactgtctaaaat

SEQ ID NO: 1522 - DNA, 599 bp, Homo sapiens
aaatgtccatgctcttacatgtctttcctagatggcagaggcaaatgcaaagcaggaagacaagggaagataaatgccattggctttagccctaaatcatgctgttcactcagctttttcttgagttgactccacatgtctacctgtgaccagtggatcagtgcttcagatccatgaatatacaatacttcaggggttatccagttttataccccaccttgcacctcgggcaggcaatggggagccaaccagaccctgactacacacaccacaccctgtgatggatggtgaagagctcaaggtggccaacagtgggctccaggtgcctctcaggtcattccacatctatctcacgacctgagccagtaaggggcatggataggacctcagacaggacttctgtgccaaccccaaagaaccagccaggacatgcctccgggagaggcgtttgcatttgggtagaacactgcctgatgattgagaccacctgggctggaaacaggacagtcacacaaatgcctggcagggcaaggggagcataggagcctggcatgaaggagaaagggtcatgtacgtggttgtgagggtcctccctggca

SEQ ID NO: 1523 - DNA, 3788 bp, Homo sapiens
ttgttattgcaggtaagcatgtgacattatttgtgtgttgccttccctactagaacatcagctccacaagggcaggaatttttgcctgttgtcaccacgatgtccctggcacccagtatgttcttggtgtccccattgatgatgcagggatgtgtggatatggggcagtggactgtgagcatgtgatgagcatgtgacccagcccctagtgaccgcaccacatggcacaggttgcttataaaaaccattttaaattaaaaaagggaggaagcatcagtgcacacagatggggacacaggggcagagggcccagccccaagtacagtgtggtcaccccacagcccagtgggcaccagggcagactcccctcgcagcacagacagctgaggcccgggtgctggttcctctaggtacagctttggtccttgtgggctcagaggtctgcctttcggaaacttgctctgttcaaggagttcctggaaaaagaatgagggtgggtcagcatggccatggggcccccaactccatagacctcccagcccacatcctcttcctcctcctcctcgtcttcctccaaggatccttctgggatctctcctgtccctgatctggctgtgggattctccgattctctcttgcagtccaccacggaaggtatgaatcatccccattttacagatgtagaaactgaggctcagaaagatgaattcatgtatctgggaaatgactgctcagagcctgccctgcctttgtacatctggatgacatattcagatgcttatgcaaaattgaagccaccgcagccaggcgtggtggtggctcatgctgtaattccagcactttaggagggcaaagcggatggatcacctgagatcaggagttcgagaccagtctggccaacatggtgaaaccctgtctctactaaaaatacaaaacattagccaggcgtggtggcagatgcctgtaatcccagttactcaggaggctgaggcaggagactcgcttgaatctgggaggcggaggttgcagtgagccaagactgtgccaactgcactccagcctgggcaacagagggagagtctctcaaaaaaaaaaacaaaaaaaaaaccggaaacaaaacaaagtccaagctaccagcaaacatgttgctgtgtatgtgtacaacagcccccatcctgtacctgtcctggtctgcctctgcatcccctctctagtctctaggatgggggcactaggtcaggcacctgaggccgggtggggtgggtgccatcagctggggcaggcgctgggtaagcaggggctgcagagcctcccgcaggcggcagtagttgcgctccagctcacggtggtactccttctggtccggcccaatcagggccttatttttccgcagcgcatcctcacatctgagggccagagggtgggagatgctcagagactcgcacacgggactgaaagcaagactaggggtgggggcacccataaggcgggaccaggcctgcagaaagacccgcaataggaggtcaggttgggagagtggacttaatgggaatcgggcagatgggggagccatgcagagatcagatgggcagagagcaggcctatgcaggttaggcagacacgagacccctcctggggggttttgcgcctacttcttgcagaagtccttgaagcagagccgcaatttgttgtgatgccggaagagcttggggtcttccgggatctctgctaaaaacacctgggccacctccaggggaccctgtggggtgagagggactggtgagccagcctgcatggcacctggagtcccccgtgcggcttgcatcccccttccaccagccgtgcctggttcacggtgggccctacagagccctgaagcaccatctgtagcatcttagcatctggtgggtcctgctcggtggcaaaggccagctcccgtgtcttcttctgcatgtcctcgatggccacctccactggcgtcagcaccgtctgtggggtaaggggaggggtgtgtactcgctggggcctgaggaggtcctgatcgaagccagtcgggggcagctcagaccccgctgggagtgagaggggtccaagaacccaggcaatgaacagaatctgggggccttcctgggtctgactctgggggggtccagccttgggtctgctgggtctggtgccctggggtccaggggctttacctctggggtctccagacttccttgggtctggaggtagagatttggactggaagttggagtttggggtccccaacctggttctggggtacatgagccaatttctgggtctagcgtgtccacgcctctcctctctgggtctggaatccctgggcttctcctccctgggccttcttagatttggagtccctgtgcctcccctttgtgagtctagaatccctgggtcctcctgggtctggaggtagaggtttcagtttagagattggaatgcagggtctccatatcttctcagcccagttctggggtacctgggcctcttcctgggccacacctctcctccctgggccttcctagatctgggctccctctgcctcctctttctgggtctggaatccctgggccaccctgggtctggggtccctgcatcttgcctcccaggtctccctgggtctggtctcctcccctcccctccctggggatctggtctagggtccctgtgccacccctctctgggtctgaggtccgtgaaccaccttgggtctgggtccctgtgtctaccctcccctcccctcccagggtctgatgtcccctcacctccccacccccgccaggcccaggatccccacccacctcctcccggtggcacacacggatgcgagtcttgatgtaggggaaggcgtggtcggtgctgagcagcgtcttacgcttgtgttgctcgggcagctccccgtgtgcgcgcccatccggcgtgaacggcgtgcagaacaggaatgtgcgaagcccatagttgcggtcaaagtaggtcacccggtccttgagctcgtaggtatcaaagtacggttccacatacgtgatctggatgtaggcctgggcgcagggtcaggtgtgaggatcccacagccccagcacgcacagcccaagccctgttcctggagagaggggatctggggactttgtcatttccaagtcttcctatgtctggatgtttgggaatcccctgaggaataggttttggggtccctcagtgaaatatgatttggggtttcccagagaaagaggatttgagggtccccaggaaacagcacttggagtctctgtgaatctaagattttggggaaatggttgggggacccaccttttgtgagtcaagcttggacttgtccacagggttagagtctttgataatctcaacgacgtcgtcgccaaatctctccgtgtagaactcctggagacacagggctgactcggggccacccagggacagcccctactccagccccaaggcagccccatgccccgttccacccccaaccacaaggacgtgcctccagccggtgtgagatctctgccagcttcgtgatcgatggctccttgtacacaaactcctgctcatccaggtcaccgaagtgggcgccgtagaagcccacgcggaaatacgtcccgaacacgcgctggggctgtgagaaagggtgtggttgtccgggaggcccctgctggaggtctccctgccccagagataggtgtctcgaatatcaggatgggagtgtgaggaccccgagaacatcagggcatgggcacaggcagggggccctg

SEQ ID NO: 1524 - DNA, 128 bp, Homo sapiens
gagacaatgtcatgggagaggtcagaggtcagagttccctcaacccccagggtcctggttaacactgccccgtgagaatcattccgtggggggagagatcagagacgggaggggggcgggggcgaaga

SEQ ID NO: 1525 - DNA, 3211 bp, Homo sapiens
tgcgagtcagactgcctgcagcaccggctgaggcttacctggggaaagagaaccacggcgccgggagttaggagtctgtagggggaggggaggagatgaggccagccccctccacagctggttcacccagccccccaacccaggtctgggacccactcatagacgcacacccagcctggctgcggaagggccccccccgaccccctcccccccgcaggtctggaacaaagaaaccaaacctcactgcctgcttgcacatctgtccaggccctggacaggctccagctgttcccatagcccagcctccacatagccctggggctggggggccccaagcccaacaggccccacccttcctgcaccccctcccctcagcccaggcccggagctggccacacggaaggatgggggttgaggcgctaaggggttggggaagaagggaacctcgtcttcctgcaaggatctgaggagacagagacgcagggggacaaagagaggcaaagcatggcgaaggggacccccagtgaccccaaagctgagagctgggtcaggcctggactgggtcggggggaaggggtagggaaagttggggaggcagctaggagtgaagcctttcccctttatggaaacaattttctctaaaaataaacagtttcactgccgggctacacagaacttcctgcccgcctaggatgcgtccgggcccaggggcgcagtagggatagagggccgggtggaggcccaggaagtcctgggggtggaggggaggaagtaagagggggcgcctggaggctgcaaaagggagggacagtcagagcctctcactaaacccccctcagccttggaggccggccagggctcttttgtccccaatataacccatctgaacttggctggtcctttctgttatctgacctccagccatcatgctgcagaggccccagcccatcccaccatcagagtaaatcctttctggcctttgagtgctggggccggcaggtaccttgggaggatgggccaggtagggcacctgctgggcatgaaggcagggctggggctccaggggcacctgagcttgtccttgttctcccgtcctgtcttgctttgtctctctccaagtctctctgtgtctctccacgtctctctgtgtctctccacgtctctgtctctctgcgtctctctccacgtctctgtccttctgcgtctctctccgtgtctctctccctgtctttccacgtctctgtcttcgcttctctgtctttcaacacctggaacacatggtcaccaattgcaggaaattccgttttccatttgcctggaggctcacccctgagcaacagaaagttgattgaaaatattttctggccaccaaagagagatggagaagcagggagcaagcgggattggagcaggattggaatagccgagcggggtgggctgggggtgggggaagtgagggtgctgctgggtaaatagtatagtaacagtaatactaacatcaactcttttttttttttttttctgagacggagttttgctcttgtcgcccaggctggagtgcaatggcgcgatctcagctcacggcaacctctgcctcccaggttcaagcgattctcctgcctcagcctcctgagtagctgggattacaggcacctgccaccacgcctagctaattctgtatttttagtagagatggtgtttctccatgttggtcaggctggtctcgaactcctgacctcaggtgatccgcccgccttggcctcccaaagtgctgggattacaggcatgagccactgcacccagcctaacatcaactcttttaattgtcatgacaattctatgagatgggcacttatcgccccgtttcacagacaggggatgcagagggtacagaaaggtacagtggcttcctcggggtcactggggccatggggaagtggctgggcctgaacatgaacctaagcctggtggatccccccactgcccaccaagccaccaccctcagactccacatcagatatctctacccgtttcccagatacggagactgaggtctgagggtactcagtcatctcaccgccctcgatgaggaccagcacgtcccgagtaaggggaagagaaaggagacgagggggtgtggtgggggagatggatgtctgtggctgagacccttctctcgccatgggacccctggggaatggggaaggggtgacaggataagacagagatggagagactggagcctataagaggggacaggtagggagcgcagggaaggggcgcgggtctccccaacccaccacccaagaccggcctgcacatcgcggaggtcggtggtggtggtgggggggggtcttcccgccccaaactcggggtggggggaggcgagaaggaccccgccccgtgcagagagggggcggggcctgtgggatcccgggctaatggcaaacagctgccgctccccacgccggcccagccgccaagcccaggcccagcccggccggacgcccggccgccttcccgccgtctggggcatggccgcggaggagggcgaggggggacagtgcggggagagggcagagccggggaggaacagaggcagaaagtgggacagagacaggggagagcgggcagaggggagccaagacaggagaaacgggcagggcacgaggaatcgatggggggtactgggaggaatcgatgggggtatggggtcaaagacgaggagggggcagggacgcggggacagacactccaagtctggaaagtttgggcacagaaggtggagttggaggcagcggctcgttgagaccagcgaggtcgtgtcccagggttggaggcggggggtagggtagtaggtgtgtgtggagggggtgcacactcgatccccgaaccagacttgaacccctacccagccccgggtcccactcgccttgcgcgctccggccgctgccttccctgggtcccgccgcccgagcgtcttcgcgcgcgccgcagcctgggcgcccggccctcggaggtggctccgcccgcaccacgccccctccggctggtcccgcccccccagccggcaccgccccctccagccgcccgggcgccccggccgcggtggggggtggggatggagagacgctggttggagactggatctcacctggacagcaggtgtgtgtgcgcgccggggtgtccggcctcgtccttccttcctccc

SEQ ID NO: 1526 - DNA, 3310 bp, Homo sapiens
gtccaaggaaaagcctggaggctggtatagcacattccgtcgagggaagaaggtgagtcaccgaggccgagatggggagtgacatgaaaattgatgggaaccagcaggggggtttgaggggtgggttctgagaggtgagatgaagaggataggctttcctctaccttcctagggatcgcaagctggaggtggggtggcagcagcatcagatgtgtaacaggcagtcaattgccatacagaatgatggtgccaggataggggaagcacagggcatggtggaaatttagaggcagtgttggaaagaccagaaggcttcctagtagagatcacagctcatctgaagcctaaagaatgcactgtgttagcaagctaggaaggacaaggacaagtgttccagggagagggaaaggcatatgcaaaggctcagtcaagacagggtctggtgaatttgaagaagaaaaagccacatggctgggtacagtggcctgtaattccagcactttgggaggccaaggtaggcggatcacctgaggtcaggagttcaagaccagcctggccaacattgtaaaaccccatctctgctaaaaatacaaaaaattagccagacatggtgatgtgtgcctgtaatcccagctactcaggaggctgaggcaggaaaatcacttgagccctggaggaagaggttgcagtgagccaaaaccgtgccactgcactccagcctgggcaacagagcgagattccgtctcaaaaaaaaaaaaagcattattaagatattttgtatttttttcagattagctcttcaaaatctgatggagattttacatttatagtacatcacaatttgaatgctaaattttattgggaatatttgctctatatttagatttcataaaaccattgaacaacagttcaaaaagtagattcagactcaagttgttccaagcataagctttctgataactggattgaagctcagtcattagttgtgaatttttttaagtaaaagaattcagggccaggcacagtggctcacgcctgtaatcccagcactttgggaggccaaggtgggcggatcacgaggtcaggagatcgagaccatcctggctaacatggtgaaaccccgtctctactaaaaatacaaaaaattagccgggcgtggtggcaggcgcccgtagtcccagttacttgggaggctgaggcaggagaaaggcgtgaacccgggaggcggagcttgcagtgagctgagaccatgccactgcactccagcctgggcgacagagcaagactccgtctcaaaaaaaaaaaaaaaaattaaatgaagttaaaaaaaaaaaaagtcccagccaggcatggtggtgtgcacctatagtcccagctacttgggaggctgagatgggaggatgacttgagctcaggagatggaggctggaatgagccaggattgtgccagtgcaccccaacttgcgcgaaagagcaagatcccaacccttaccccccaaaaaaggaaaaaaaattaaataaagtaaaaaaaaatccctccttcaaatcagccacatttcaagtgctcaaaagccacgtggctattagacatgtggctgccatattggacagggcagaaatctggtatcagggacagtgagctctgtagatccagcgactcacaagagtggaggcagagttgtgtcttctgggtggggatgagtgtgttaaaaccctggattggtggatgaagcaatcagaatttgggaggtcagatggagtgggcatggaggcctactggatggagaggtggacagagtggatgttcaggtgactcttgggattctgccagggatctctaggtggctggtgggacctcctcagagatggtgacatggggggggtggcttgtctgccagtggatggagattccagggggtggcttctgcagaaagaggctcatggagcccctcatcctctgccttgccctcctctcaccagttctcctacgtggacgccgacgggtccccagtgaatgtcgtgcagctgaacttcctgaaactgctgagtgccacagctcgccagaacttcacctactcctgccagaatgcagctgcctggctggacgaagccacgggtgactacagccactccgcccgcttccttggcaccaatggagaggagctgtctttcaaccagacgacagcagccactgtcagcgtcccccaggatggctgccgggtaagagggtggggcagtggccagctagagaggggaggcaagatgtcggccaccttcccggtaactcaccgtctctgtcttctctggggacagctccggaaaggacagacgaagacccttttcgaattcagctcttctcgagcgggatttctgcccctgtgggatgtggcggccactgactttggccagacgaaccaaaagtttgggtttgaactgggccccgtctgcttcagcagctgagagtgtccggggtgggagggaccatgagggagccccagaatggggtgcatttggtgctgaggctttgaagccaccgtatttttcgttacctgtgactatggagccaatgggatgtgacttcgctcatcacggacagtcattccttctcctttccagggtgctgggggctggggttccctggcccaagggtccagcctcctctcaccccattccaggtggcatactgcagtctggctctttctcccctccctccccacccaagcctcacctccccaccccttgaacccccatgcaatgagcttctaactcagagctgatgaacaaaagcccccccacccccaatgcctgcctcctcactcctccgtcgctgcccttcacaccttttggtgctacccctccccagagttaagcactggatgtctcctgatcccaggctgggacccctacccccaccccctttgatcctttctacttccacggtgaaaggactgaggtcggactacagagggaagagggacttcccttgactgggttgtgtttcttttcctgcctcagcccagctctgcaaatcccctccccctgccccccacctccccaggctcaccttgccatgccaggtggtttggggaccaagatgttgggggggtgaatcaggatcctaatggtgctgccctatttatacctgggtctgtattaaaagggaaagtcccccctgttgtagatttcatctgcttcctccttagggaaggctgggatatgatgagagattccagcccaagcctggccccccaccgccaggccatagggcataatttgcatctcaaatctgagaataaactgatgaactgtg

SEQ ID NO: 1527 - DNA, 495 bp, Homo sapiens
actgtaacctaaagcactgggattaagcagtgggagaaagccactgtgcccagccccatattgttttgttcttttgagacatagtctcactctgttgcccaggctggagtgcagtggcgtgatcttggttcactgcaacttccacctccccagttcaagcaattctcctgccttagcctcccgagtagctgagattacaggtgcctgtcaccacacctggctcattttgtattgtatttttagcagagacggggtttcaccatgttggccaggctggtctcaaactcatggcctcgagtgatccacccatctcggcctcccaaagtgctgagattacaggtttgagccaccgcgcctggccccatgttgttatttttaactggtttattttctcctggtttagtgggagctcagatgcccagtggatgggaatttagacaagcttggacttcccactgggcccggagtgcaagacttgatccctaaacaattact

SEQ ID NO: 1528 - DNA, 11311 bp, Homo sapiens
  misc_feature (7272)..(7272): n equals a,t,g, or c
  misc_feature (7274)..(7274): n equals a,t,g, or c
ggatgaacatgggtggcatccaacacatcaaggtaggagaataattcactcccatgtggaccgggctttccccctgtgttttctctctctgtcttctttcttaaaggattgaggaactattgttaatttcctttttgaaatcatttgaatatcaaaagtatggcagtttaaaagtgaaatagctcagtttatgttcattttgcattatctagatactgaatatcctgaagctattttaaaaataaatctgtataaattagattttatgatttttctaaccatgaagaaaatcatatgtacctaatggaagtatcccacagcaggtaaaatctgtttatgggaactaaatcgttgttcaagctcagtagctcagtatagcttaatttcttcccagtttaactcactgtcaagattaaagtgttacttagaatattacttcctatttcttatgtctaatataccttttctccctaattttttactggaaagcaaacttgtttgttttgctttgttttgtttttccaaaggaaaaacactacctttgggtgagtcttcccaaagattgaaaatgacctttggcggactattatctgtaactaatgcaatgaacgattcgccatcattcatttattcattcatccattcattttataagcatttatggcgaacatcctatgtgtcatatcccctgctaggcactgggaatacagtaatgaaccaagaagacaaaaattcctgttcttatggtgctagtaggaggagatatattaatacaaggaggaggaggaggagatatattaatacaaggaggaggaggagttgatatattaatacaaacatacatacatgaatgtttaatgcatgcatatgtgcatatgtatatgtataaaatatattagctggtgataagtgctaaggagaaaaaagagaaagaagattggaatgccaggcaataagggctaaagttttaaattcaggtggttaggaaaggcctcagttacaaagtagtatttgagaagagacctgaaggagtgagccatgtggcgaaatagggaaagagcacaagcacgtgcagaggccctaaggtttgagcacgcctgttgtttaaagtgaggaggcagcgtggcaaggagagagcaaagaaaaggaaatgggagaagctagggtcagagagggtgcagggtcagatcatgcagccttcaaggagtttgtagggacttgggcttttatgccaaatgagtcagggtttttggaggactttgagcagagaaatgccatgatccaacatgtttttaaagaaccacccttgcttagctaactgattttcagtctctgcactgataaaatagcagtgtagtgattaaaatttgaacaaagtcctaacgggttttactgttaagtggaaactgatcactcttggaaacacacacaaaaaagatgacctacgattacacaaatgggaggggttaatgggataattaccctgcagctgacagctttgatctggtaggtggtgaattcaagcacgatatttttcagagccaaattgcccaagctctgatcttaatgatattctagggtgtccagtagtatctagctgggaaacatagaatgaacttactttaaaagagtaaaacgataattttaaatatttttaatcatatgttaaatagttacattttcaaatacagtcatgtgccacatgacatcattttggtccaagatggatcatatatatgatgatgtctcatggtctcataagattataataccgtgtttttactacatcttttttgtgtttcagtatgtctagatacacaaataccactgcgttaccattgcctacagtattcagtacactaatatgctgtacaggtttgtggtctcgaatccataggctatatcatatagtctaggtgtgtagtagtaaactatttcatctaggtttatgtggctatatcctatgatgtttgccaaaaggaaaatcacctaatgacgcctttctcagaaggtatctttgtcattaagtgacaaacaactgcaatgtgctcaatatgttttcagatggagtatatctgcagctaaaataatgggtatagttgttaattagaaaaagtacaacaaatatactcaaaagtgtccaagaagtctggaaatagagaaaatagtatgtctactgcactctttaccaggtgaacccattgctttaaattaggaagtacttcccttgggaaagtgtctagagattaaagaaggatctattgactacattattttaaaatataattagtgctgagtaaaaattagtttatcctgttttttgtctttgtggacatcatgtactaggctgaccaatataaaattgccacctttgcagttttaaagtggtcaaatatcagttaatttatgtgattcaatctaatgtaaatatataaacaggcacatggctcagatgtggtcattttgatgccactattagaatgcagagttgtccttatgaagcctaaaagataattatgaactttctgtgtcttttccattgccaggtcatgtgtgcatcgggcattgttacccattcctaggcctcgctccttccccaaacctgggggaagcttaggcaggcctgagagctccagcaaggttgagagttagaatagtactttgcaaggaggttgcagaaagagatgggggagagaggagcaaatgtcatagttgtctcttgctcatgacacttggttataaaaagtaacgcttcttatgaagttttacatataagatgaagtgagtggaccaagaaattataatacattttttatcatcaaagagttgcatcaaccaggctatagcacaaagtctgattttcagtactgcctcatgacagtaaatatgcattttctagaatggtgctgtccagcagaacttttgtgacaatggaaatattcagtagctgccctgtccgaggcagtagccactagctacacatggctactgagcacttgaaatatggctggtgcaactgagaaactgaatttttaattaattgtaactaatttaaattggaaaagccacttgtgactagtggccatcaagtgaacacagttctggaaactggataattcagatttttttacctagcatctagggaattggagatactgacttaaaggatataattattttttaaaatagggcttctaggctgggcacggtggctcatacctgtaatcccagccctttgggattccgaggcaggcagatcacctgaggtcgggagtttgagaacagcctggccaacatggtgaaaccctttgtctactacaaaaatacaaaaattagccgggcatgttgtggtgcacgcctgtagtcccagctactcgggaggctgaggcacgagaactgtttgaacccgggaggcagaggttacagtgaactgacattgcaccactgcactccagcctgggctacagagaaaaaaaaaatacagcttctagtttagtgaagaaaagggcaatttgagggagagaaaaggaactgcgttctgtgtgaaaggacagagaagcctggtgatcagagaataagatcccaaggcacttcactggggctgacattcagggagcctcctggaagaatcatttcaaaagcaattgcagtcaaaacagattttgagagcactcttagacccagaaatgtatagttgtctgcatgtaagtgctaaggctaataaaaatcagaagacatttggaagacatatccttgaattgaaaaaaataataattgaatatagcaaatgcaagttcccacttgttcagcaatctgtttaacttcttatcagagtcattgttaatacttccttttgttgtacatgccagtgcctggatatctaacgtacaatttcttgtgctgtcatttccactttccttttcaccaatatgaccagtaaatacagtaagaaatagacactattgatacagagcctggatagtcattaataacagtaatgttagtatcgtattgagcactcactatgtgtctaagcttttgacaggtatttggaagataggtaagcactggataagtattagttgtttgttgctacatggtgtcttcactctaagagatacaatttttaattgtgatggaaatgtagagggtcactggtgtttatccacatgggagctataactaagaatagatggaacaaattcatactttttctaatgggggaactccaacaatcttagctctgagaatttgcagaatacagatctaaaagagggtggaacgaataagggaggtaatacatccagaagcagaaaaaatgctgaaaaaagctaatagctgtgactgagttgccagggaccccttctgggaccaggcacacatggttgctagttgaagaatcaaacaaaacagttggaagccaacagagggtggggacagttgtgtttagtaggtcaggagtcacataccatactgcactaaaagtatatagataatgcatactgctgcaaacctgcagtagtaaaaaatttgacttcacattcttatcaagtcttttcattgcaaaaaactttattaggcaaaagttacttttacgttaacagctaaagattagaattggctgctattctctatccataggaaagtgaaactataaaatatttaatctttgtgccccgggagagggggggggcgccacaaaatattttttaaaaacattttctcatctctcattctcccatcccctccaccccattcccctaacatgaattttgtgccatggttccattttacaaggaacagtactagccccctgaggacaccaggaaatgataacctcacaccctgcattagtagaattgaaaatctgtttttctgccatttatccttacagtataactctcctctttcacattctgcaactgatctagtgcttaaaacaaatggagtcttcaaaagcaccaatagacaaggataaaattacacatacagacagggtttccatatgagaacattaatgtaaaactgggcagagggtcagtttcttagtctcttcattctctgagagagttttgtgatggatcagaatgtaattgctccctctttcccacccccagggaaaatatgtgtctgcaagagcttattatgagagagccttacagctggttccagacagcaaactgctgaaggaaaatcttgccaaattggatcgcctagaaaaacgattacaagaagttcgagaaaaggatcaaacatagcaccaccgtctgacccaacctcataggataatgtggtgcctctgaaaggggagtgatggaagccttgctttcacatcagcaggggcacaactaatgagattttctctcattccgagttcagggtgacacattttgggacatctgctggtagcccagtgctgaaggacttgcttttccatgaagaagacgaaatcagccatcaagggcaagaggtctgagagggaaggagaatgacatttacacattttacagatttttgtttggtttaactccagatttctcttgatatatctctgtgcttttgaaacctggagatctaattctgtttagacattttttgtcccacaaatacagaagcttgaaatgctatgaaggcagagcttctattctttatgggatgaaatatttcaaaagaggataaatcctctgtggtaagccatttggaaaatcctaccaagaattggcttatttaattttccagaaccaggaatgagtatctaatagcttttgtagaaccttccagaatatgtggggaaaaagggctattgctaagtgagctttatctaatatcctcctaagagttttactagtgcttttttgaggaattacagggaagctcctggaattgtacatggatatctttatccctagggggaaatcaaggagctgggcacccctaattctttatggaagtgtttaaaactattttaattttattacaagtattactagagtagtggttctactctaagatttcaaaagtgcatttaaaatcatacatgttcccgcctgcaaatatattgttattttggtggagaaaaaaaatagtatattctacataaaaaattaaagatattaactaagagaaatgtcctactttattatcttaatgttcagacatcatgagatttattatttttttgaaaaatatattgaaccattgaggaacctttatgatgtatcacagaaatcttcatagattctaactagatggaaaaagagctctatttatttgtgttcctaggcttaatgagaattctgggcttagaacatcaacgattaatacccagaattctttgttttgagaatattatggagaatgctctaaaaatctagggtaaagatctaaattcaaattttaaatatatatttatatttaagaaataggaaaggcaaagttgaactcacaatttgacatttatttttagtgttatttatttcataacttataaaatatttaatatatacatacacactcttcttttttctctgtacaaagtggttttaatatcagctttcaaaactgatcttataaaatgtaaatctaaattgtaaaatagttaagttttaacagtccctcccaaactttgtgttgattattcacttgctaaagagatgtgaggaatcagccttcagttttttggcagtagtatattttggaagtgaagaaattggaacacctgtttctaatttggtcttcatcattaaagacaaaaccaaaacactccaggcagtactgtttatagtgctgagccaggtagcacacagacatagtagcctaaaggctcacataattcgcatgctcaggccagggcagggtaaaaatagccttctgcttctttcaacccagtatcaggaagcactaccccagtgttattatttgttttgtcaaggtaagtctaaataaacaagaaaaacttcttcggaaggcatggcgaagggagtattttaaatgaaaatgattacagaatttgaattagcatgcatctctttgtgtgcaacagtaatccaagaatgtatatgttaccactacaaccatttgtttctaatagttttttcatgttatataacataaatgtatccacaaccttaattaagaactattcttcccccaaaatcatagtcctagtgtcaagaaacatactccagtgtttattgtaaaataacaaccacaccctcacattgaaaaaagtgaatgtctagagctgatataaaaaaaattctttaataaggngnctcgaaccttttcagaataatctgtaatgaaaactcatgcttaaaaatttaatggaaaagactgagccccaaattttgaatagtgattatgccttacttgaagtgctaataaaggtaggagagtacatttgttggaataacagaaatggtgatttcagcctaaaagtttctgagggtaaaggatcacatgaccttcaggaaactctctgcctcctgtaggtgctttcctatctcccccatccttccctaccccttttcccttttccttcctctctttttctctcactgtcactctgtctacacacactggcatcttttgaacactaaaagtaagcactgttttttaaaaaagtaattatttgttggatcagatacttttatcccaagtgaataccttcactgagatgtggccaatgcaatagtttcacagtaaaaacagtgcctataagaaaatagatcacatactatttttcaatgatattaagtgtattttgtaactattttcatttggtccttgtaacatgaaataatacatggaacttacctttataataaaaatggagtgccctggttcatcatagaggtgcatctagtttgcccttaatggaagtatacttgctgtgtggattgatagcaccttcttgaaatggaggagctcagctggcctcatggatgtgcaatttttgcagtcccacagggccttgcatacagaagcaccccgagctcagttgaatgtctgtttgattttttcttatttatttttttgagacacagttccactttgtctttttgtcacccaggatggagttcagtggcacaaacatggctcactgtagcctcgacctccctggctgaagggatcctcccacctcagcctcccaagtaaccgagactacaggcatgtgccagcatgtccagctaatttttgtattttttgtagagacagggtttcaccatgttgcccaggctggtctcaaactcctgggctcaagcgatctgcccacctctgcctcccaaagtgctgggattaaaggcataagccaccatgtccaactgaaattcttaataattaataatttttgagcaagaggtccacactttcattttgcactgggttcccaaacaggtcctgggtaggaaggatggctgaggataaaacaggagttgctttggcctggctgaacatttgaaccaatgatcagagtttcattttatgattgtgttactctgaacagatttgctatttttttccagctacatttagagttcctcatgtatatatcacccctctttttccagtccatctaacctctccttttttttgtgcctagaatcagttctccttgccttcaaaatccctgataagtgtccatttctttttgtatcctttgatgtagaagccacaagaatggctttagcagcttattttaatcttatgaattattcattcaggattttttaaatgattcagatgctttcaatctgttaacagtatttataaaacatgtttcagtgatacaacataggtgaactaaaccaaagatgcaaatgccttggaggaaaagaaattgtattatagagaatcctgagatatatccttttgggttgtttaatttaaagcctatcacaaaacaaagagaattgtcgcactttaattccaacctcctgcagtacttcacaacccttagcataagattctgaaatttgtaataggtggtacctagtttgatgcagggttttgcagcagttgtgcgaatgcctctgcgcaacggcctttcagtcagactaaatgagaaaatccaaactgtcctatcaaaactgacccacaataactgtactctgaggcgaaacagagcaaatgtgggtttcctgttttcattgtaaaacattccaggttctcagattgaagagctacattcagctgatagttgacatctgttccctcacacgtagtggctctcaacacgggctgcactttggaatcacctgaggacctttcggaatcttcggttgaatcatcctggctgtcctggtgatgcttcttatgtgcagctaggctggagaaccactacagggctgacacctggaatgggagcttgtaacttttacaaaataatagatgtttatcatcttttgcaatttttacttttaagtctatactaaaatgagccaaagaagtcttaacaatgatgtatggcacaattggttggttgaggctatcattccatgattacaaataggtggttatgtggggtggttttgcacttgtggcaattggactgcaatttggccttaaaatgacacaattcctcgttctcagatggagaggaattgccttgaaatttgcatgtaccagactaagtgccagtatatatatgactgatattttcgtgactcatagaaggtgtccatggtatagagtttatgcctacatctctatctttattttgggcacacatgagcttttgttaattatttctttgtacttgttagaatctgtttttgaaaaaaaaaaaaacttttgctttgatttgtggtggattcaccttcttaaaataataaatttagaggatattaggaatgacattcaaaacaaatatagtgagaggtgattttttaaaaatttttgttcctggtttccaaattatgtttactttgatttgattatatgttggtatctcccaaatataggttaacttagctatttaaatggtatcttttgacatttaaaaagaattaagtacctgtcaaatcttgcattgaggttgcagttgaataagataaaagcttaggatgtcaaaaaataatatagagaaatattataagattttatgattattcttgaagtttttgatgcaaaaggaaaatatgctgaatagttcttccaaaaaatattatttccctcaatattttatttgtagccatgtaatttaaagagaacagaaaataactgcaatcaaaagtatggtttaatatcaatcaaagtggcacaacagaattgataagatctttataacaatcaattggctgatattaaaatattgattttaattgatcttttcaattaaaatctttagggcctgtaactcataaaatcagcatccaccacaatatatggtcattattggtttgtaagcatagatcaccattgactcctacctggagagacatgtctatttctaaaaatccagtagtttctttgcattctcagtagtacacgttgtatatatatatatgtaacaaatttggtagttttcagtatgtgtgatgtcctttgggggttatttatcttgctggtccataggaggggtacactaccccaagaatcaagacatctgagttctagttctagttctagctctgccactgaagagccaccttacctggggcaagttagccattgtctcccagtcatgtttaccacccatgaaaggactcgtcggtttgatgtttccattaagctcaatgagtaactctaatagttactcttgaatctggattgaaaaacaccatgcatctgatgagataattcataaatgttgccccttttttaaatgatacaaccctaaaagtgactgaattgcccaagtgcttgaacatggcagaggtagttactcttattttgcagtttgtgcacttaaaaattcctacagtgattgttactttactggggaaaaaagatgaggtgaaacttcctcccaaggaattaaaatatctgtagaagccatggcttgcttttataatgtggaaatcatttgatttgctgtaattcacgcagatccctccttttgtcagggggaaatgatttgcatcatgttcttttttcataatgcttttacttcctgtttggatcagttgtatgtaaatgtacatttttgttactttggctgtgcccgttagaatttatcttccataaagtatttctcccattgagtctaatgatgtatactttgcctaggtctttccaaaattaaatttatgtaaatgtctattttatataaaatatgattaaaataagtatgtctggtttcaatctc

SEQ ID NO: 1529 - DNA, 19866 bp, Homo sapiens
ggaataaagaactgtccagacagctcagatttacacaacaactatggggttttcttagttgatactggtaagtgaaattaaagagaaactgtactgctgagattagctaatacaatttatcaagcaaaatggaaggcaaataatcctcagaagtaaaattcactgggcttggcaggaagctcacactattgacagtcattatacctcggggctgtcatttctctagatcttcaagctcgattcagtaaaatctggccattctcatactcatttctctatggaaaactccccaggggacaggaagtagccttatgatttaataagtcccaatcttctttgaatattatttatatatatttataaatccatgatgatgaaatgtttctctacaatgatgcaaaacctgcctctgaaagcagttactggcagatggtaaatacttttctataacatattttttaaaagcctccagaattgttccatcattccttccttgatgtacattagaaactgcattattaaaattgatacaatgctcttatatgacaggtgctatataaaatacacttactttatcttacttaatgcaaaacattactgggcatgaattctcttttctttatgacttatgtagtgcctctgtactgttggcatgcaatgtaagtaatgaaattatatttaaatgtaaggccaaagcaccactttgttcttgttgattactagactagctgccctgcagcaaaatttagtttaattagtttttcaatatgaaatgcttaaaggggttttattttcaaggatatttggagctctcttgttttacagaatataaaatttacattctgatacatctaagaaacttaccttatttttgcctgtgtaaaattgttgtgtagtgccacctgctggttcattggccacataataataaactgtcttaaaaatataaaaactagaagaaacctctagttgggcaggtctaaccctcctccttttacttcaacaacagtcccaccccaccacacccctaaaaatgataactctgtgaccaccctatgacattgagcctctgcctccagagacagaggctcctagggacctcctagtcaaacttgtattcaaacagatacgcttgaaaagatttctgtgtagataatagacattccattctatttagaatttcacagtgttctaaagtgtagttactgaatatagtttcaccaggaagctactttgaagaaacctatcagagtagagggccttcattctgcttctggccttactctcacttgccttgggatctttatcaagtctgttgaatatctttgcactttagtgtctatatctgtaaagtggaaaatttttgtgtgtggttttttaaatatctcttaaatcctgataaacagctaaacagtatcaaaaggcagctaaattgtataaaaaaatacctgcaaaaaccatacaaatgtaagtatttaaaaatatataatgcattggacaagtgcatggtggcattattatgttgtaagtcttattaattaagtgccattcaaatgaaagtgcatgattttaaaagagattttcactatagagctgatatgtgttatttaaagtaatgcttcaattgctatgttgaagtatagttcattgagacagacccttagaaattgcttctggacagttttatttctacagtagcctgttctattttttatataatgagagccagttatatcttggataaataacaatcactaataatctgaaggcatcctattagcaagagcgatgaccagaaaaatttcgactaaaataatatatataattaaaacaataggttttagtttttactgcttttttgttaatttttttggaagtatgaatgaacagtgaaattgttcaaagttaggcaatggccaggatgagaagctgaaatgcaagctaatttgcatattgaataattttggtataactctgtaataatgagaaagaattataagtcagaagagaaagtgaaatgttcatgtcttttataaaaaggcatgttctgctcttaccaacctgtcactggttacaggcttaccagaaaaggcagtggcccattaccagcaggccatcaaacttagccccagtcatcacgtggccatggtgaacttgggaagactctacaggtcactgggagagaacagcatggctgaagaatggtacaagcggtaaagttccctttcttttctttataagttgcccaggaacctcagcaatcactcatcagcttcttagttaatcagaataggtgtgctctcagaatactagcaaattttgccaattcaggtgatacaaatttttatctccaaagaaagcaaccacaatataaatgggatcataattcatgactttggcttgctggttagactatagtgctgaaccaaggttgaaatttaattcccactttagtcagtttgttgttttctgaagccatggattgcaaccccaatcataaacagcaatttaaaaaatgaggatacatgaaaaactatgcacacatgagaacaaattcatcataattaatgagaaagacccttggggctcagtttccatattgataggtcaataagacattcttacgttccaactatggcatcatgatcattttgtaaaaaccttgttcttggccaggtgcggtggctcatgcctgtaatcccagcactttgggaggccaagatggtcgaatcacctgaggtcagatgttcaagaccaacttggccaacatggtgaaacctcgtctctactaaaagtacaaaaattagccgggcatgatggcgggcacctgtaatccctgctactcaggaggctgaggcaggagaatcacttgaacctgggaggtggaggttgcatgagccaagattgtgccactgcactccagcctgggtgacagagtgagactctgtctcaaaaaaaaagaaaaagccaaaaaccttgttattgatataaaaacaaagaccgtattggagcagaggttcaaaccatggaccgtcttccctaaatctaagcctagacatttggaaatgtacctattagaagagaaatgtcatttagattttctccaaactcagcgccctgcaggtggcacacaaagctgagatattgtcacctttgggagcactgtattacaacactggccgatacgaagaggctttgcagatttaccaggaagctgcagcacttcagccttctcagagggagctccgcttggcactggtgagtaggatgaaagaaaatgaagctggcaacctaagcacaggcagccatagagagagctgtagtcctcacgcctcaaaactggagctggaatgccgtaatatatccactgtatgaatattcatacagctaatgttagagccattctctaaagacatggacaccaaaaatactgcatttttgttttgaaataacttcaaacttatgaaagtgttgcaagaatagtaaaaaatttacatataccctttcatccagctccaatgatttgtaacattttgattcatttatcactccattgtgtatgcatatgtagatgtatatgtacctacatgtatatgtgtgcatatttagatatgtatgtttgtatatacctattattagtgtgtgttatttttttcctgaaccatgtgggaattagttgtatatatcattcccctttatctctaaatacctttgcaaatagtttctaagaaggacattctctaacataaccacagtgtatttattagactcaggaaaattaacattcataccaacaaaatttttatttcagtgtttggaacttcactcatccttttccttagatgtgcaataaatcaaatttgttatcttgctgtaaacacactgttctgatgaaatcagaggaaattctttctcttctgacttatttggtcaaccttttttaaaagccacaagccatttcactggatatatttagtgtttctgccactcactcacaaatgcatgcacaaaactaaataaagaaacaaacagcaaaaagtcaaaacctgaaaactggtgattcagccttctctatgagtcactaaattgatgctgagcatgtttgtcaggagtgcgttctgaatgcttctattcagggatgctttatttgataaggtaatgaagtctctgctaagccaaggtccatgtggttttgtaggctcaggttttggccgtgatgggtcagacaaaagaagctgaaaagatgaccaatcacattgtgtcagaggagaccggatgccttgaatgctatcgcctcttgtcagccatctatagcaagcaggagaaccacgacaaggtaaagaaggacattgtttagagttctttggattcataggttaaacatggggtgcacctaagtgattctccagtttgcgtgtttataagcctgggaaatcttaaatcttatccgtcagcatatcctatctcttggaaacttttcacagatatccccttaacacctaagatgtccccttgtaataatatttttcttggcttatctttggtgtaaagcttttatgtggtattgtcttagtttgttttcagctaagtctataaagatcaagaccaacatttatatgctttattattttgtattttccttcttatatattgttttatgtaatcctcataacaaccatgctttacagggttgttatgaggattacataaaacaatatagaagaggaatatataggaagattacatgaaacaatatataagaaggaaacacagggtgacccaatgtcacaactgttattatctccattttaaaagtcacataatcagtaaatttataaactgactcaatgaagtaattgttgaaggcccactatgtcctggccactgtagtaggcatcagaaataaagtggtatgaaaaaaaaaaaaaaaaagtcactgcccttgtcttcatggagctaacccatagagaaggagattaaacaggtactcacaaaacaaatgtagagtgatagctgtgcccaggaatatcatgaagcgctacctctcccaaagagcatataatcaggggacccgatgagtctgggaggccaggtctccctgtaaagtgatgtggaggtgagggctggatgaagaataagagttgttaggcagaggaagaagcaaggaggattctgggcagggaaacgcacatgcaaagccctgtggcagcagtgaggggcctctctgaggaatgggagtgagggagcaggagcaccgtaggaacgcaagcacaggctgctgggaggagactccttggggccaggccaagggttttgttccttaccatgggagaagctttgggtttttgtggagaggaggaacatgatcagatatttgctttgaagggatctttggctgcagtggggtcagtgggtgctgggggcagaatggtcactaggacctgagaggggctggtggggtggtccagatgaacacatggtcagggaaaacgtctgatgccaaatcttgttttctttcaactgtatcacaccacctccctgtaaagtaatcaaggatattttattgccactcatcgatacgtgggaaaactggagtgtaagaaagttattttgtcagggccactaattcccagtgagaaaatcaaagataatgaagaatgtatatatatttgagacaaggtcttcctctgttgcccaggctggagtgcagtggcatgatctcacctcactacaaggtccacctcccagggctcaagagatcctcccatctcagcccccccagtagccgggattacaggtgtgcaccaccacacctggctaatttttgtatttttttgtagagacagggtttcaccatgttgcccagactgatctcgagctactgggcaatctgcccacttcaacctcccaaagtactaggattacagccattagccactacgcctgaccaagaattgtactttgattgtcacataccatacctgctgacacataggaacaaaaagtataaatttgatcagttaaataagtttttctttacctaatctgcatttattctgtcttaatttccaacctctgcaggcacttgatgctatagacaaggctctccagctgaaaccaaaggacccaaaagtcatttctgaactttttttcacaaaaggaaaccaattaagagagcagaaccttctcgacaaagcttttgaggtataaactcatcataaaattatatcatcaaattcacagattaaaattaattgtcttttgatctttaaggaaacatgtacagtaagatctaagatcactggcatgtatgtttatggagtgagtgagttttttttaactaattgacgaagttttgtttattttttatcattgagcatctggcccttgactgaatcagagttgcgcatttatttttctgaataatcatgtttaatttgatgttgacagcattccacattttggcctcaaactagcttctctctgtctgtgtctctgcctgcaagaccttctattccagctggactagtacctgaaaagccttggacattcccacatgtccttgaaatgccctctcttgacttggaggatgagatttccactcatccaccaagatacagtctttgtcctcctgccttaggaagccctccctaaccgtccttattccctgtgaccttacttcttctgaactcttaaaaagcatggactgtctcatgaaggtaccagtcgtttgaaagtgtcacatattacattgtattattaggtccgtcccctaacccccgtatgtgtgtgtgtgtgtctctgtgtgtgcaggcacgcacaaatccttgcatagtttatctccccagttagattggactttccttgtagagagggactgcatccttctctgttctaaaacaatgttttgcatcttacaaggtgttcagtatctatggttttggaataaaacttattcacaggttgaactcaagaagacataagtagaaatagaaatgttacaatgttacatactttctccttatatctggtaaagccacaaattattgaagtcataaaattatactaaatatattataggaaaagtaaaatctcaaatgatacaattgtgttgggaaataagtgagtggatttttaaatattattggaaaacacatggaaagatatttgggaaagctcatttgaatgtgaatcctttaatcaaaaacagaaattgtggcatttttctcagaatttgtaggattttctctgccttttcaacattttcaatatcgtcattcttaagttatttataacgaatgtgaacattattaataacttaattgtgaatatgtatgtgtgtgtgtgtatatatatatatatatggccattgattcataataacagctgaaatgtattatcactctgtgcatgattcatatgtattatgtaacttaatcttcacaagaatcctataagaaaggcatggtcattatcatcattttatagttttgtaaactcaggcttaaaggtcatatcttgctcaaagtcacagaagtgggtaagagacggtgtcagggtttgaatccaggtctcctacactacattcccatcttcactgatataaattaatccaagagacacacccttttggtttattttagcagctttttgaaggtatagtttcataacatttctttctttcccctaaaactgaagtagaggagaatggaccagattttatttgatggacctgtttggtcatattcttgctaatgaaaatagcaaggaacattaaaatatgtgcacaaatacttagctttgtaattaaaggcaatacccttaacctgtggctttatttcaggtgaccacttgagactcagtggtgagcacacctttgatacaaaacatgcataatgttaaaaatataccacacatcactgatactacatttaataggatacatgttattcagaccaaagaaagtgcttgagggataagtaactctctttaaacatttgaagacttttcatgtggcaggggaaaaaagactgtctaatgaataaaactatcccctagtaaagtagatgttcttaaagaggcggtgatccactttaagaatttcagcataggctgaacgactaggtcagttatattgtaaaaggggatactgcattagggttaaactgttcagaagactactccaaaattctgttattataaaaagaattttcttaccaattccatttgcagtgaaaaaaggccagaaagtacaattttcttgcaggtcaaggccagttaaaaatgatgtgatataatagaaatcacctgaattccctgcaggcatcctcagtctctctaagtccaaaggtcagctctgcagggaaattatacatttcagtttcctccactttagaatcatcaactttgaaaaataatagaaataagcagggtctcctgtgaactagtagcggctggtttcattgtattactactttaaattttcacacgtgaagaaagtggtttctgcaatcctggagtttggaggtttgtttcctaacctgaggatatttcttatttatttagagctatagagtggctgtgcaactaaacccagaccaagcacaggcctggatgaacatgggtggcatccaacacatcaaggtaggagaataattcactcccatgtggaccgggctttccccctgtgttttctctctctgtcttctttcttaaaggattgaggaactattgttaatttcctttttgaaatcatttgaatatcaaaagtatggcagtttaaaagtgaaatagctcagtttatgttcattttgcattatctagatactgaatatcctgaagctattttaaaaataaatctgtataaattagattttatgatttttctaaccatgaagaaaatcatatgtacctaatggaagtatcccacagcaggtaaaatctgtttatgggaactaaatcgttgttcaagctcagtagctcagtatagcttaatttcttcccagtttaactcactgtcaagattaaagtgttacttagaatattacttcctatttcttatgtctaatataccttttctccctaattttttactggaaagcaaacttgtttgttttgctttgttttgtttttccaaaggaaaaacactacctttgggtgagtcttcccaaagattgaaaatgacctttgggggactattatctgtaactaatgcaatgaacgattcgccatcattcatttattcattcatccattcattttataagcatttatggcgaacatcctatgtgtcatatcccctgctaggcactgggaatacagtaatgaaccaagaagacaaaaattcctgttcttatggtgctagtaggaggagatatattaatacaaggaggaggaggaggagatatattaatacaaggaggaggaggagttgatatattaatacaaacatacatacatgaatgtttaatgcatgcatatgtgcatatgtatatgtataaaatatattagctggtgataagtgctaaggagaaaaaagagaaagaagattggaatgccaggcaataagggctaaagttttaaattcaggtggttaggaaaggcctcagttacaaagtagtatttgagaagagacctgaaggagtgagccatgtggcgaaatagggaaagagcacaagcacgtgcagaggccctaaggtttgagcacgcctgttgtttaaagtgaggaggcagcgtggcaaggagagagcaaagaaaaggaaatgggagaagctagggtcagagagggtgcagggtcagatcatgcagccttcaaggagtttgtagggacttgggcttttatgccaaatgagtcagggtttttggaggactttgagcagagaaatgccatgatccaacatgtttttaaagaaccacccttgcttagctaactgattttcagtctctgcactgataaaatagcagtgtagtgattaaaatttgaacaaagtcctaacgggttttactgttaagtggaaactgatcactcttggaaacacacacaaaaaagatgacctacgattacacaaatgggaggggttaatgggataattaccctgcagctgacagctttgatctggtaggtggtgaattcaagcacgatatttttcagagccaaattgcccaagctctgatcttaatgatattctagggtgtccagtagtatctagctgggaaacatagaatgaacttactttaaaagagtaaaacgataattttaaatatttttaatcatatgttaaatagttacattttcaaatacagtcatgtgccacatgacatcattttggtccaagatggatcatatatatgatgatgtctcatggtctcataagattataataccgtgtttttactacatcttttttgtgtttcagtatgtctagatacacaaataccactgcgttaccattgcctacagtattcagtacactaatatgctgtacaggtttgtggtctcgaatccataggctatatcatatagtctaggtgtgtagtagtaaactatttcatctaggtttatgtggctatatcctatgatgtttgccaaaaggaaaatcacctaatgacgcctttctcagaaggtatctttgtcattaagtgacaaacaactgcaatgtgctcaatatgttttcagatggagtatatctgcagctaaaataatgggtatagttgttaattagaaaaagtacaacaaatatactcaaaagtgtccaagaagtctggaaatagagaaaatagtatgtctactgcactctttaccaggtgaacccattgctttaaattaggaagtacttcccttgggaaagtgtctagagattaaagaaggatctattgactacattattttaaaatataattagtgctgagtaaaaattagtttatcctgttttttgtctttgtggacatcatgtactaggctgaccaatataaaattgccacctttgcagttttaaagtggtcaaatatcagttaatttatgtgattcaatctaatgtaaatatataaacaggcacatggctcagatgtggtcattttgatgccactattagaatgcagagttgtccttatgaagcctaaaagataattatgaactttctgtgtcttttccattgccaggtcatgtgtgcatcgggcattgttacccattcctaggcctcgctccttccccaaacctgggggaagcttaggcaggcctgagagctccagcaaggttgagagttagaatagtactttgcaaggaggttgcagaaagagatgggggagagaggagcaaatgtcatagttgtctcttgctcatgacacttggttataaaaagtaacgcttcttatgaagttttacatataagatgaagtgagtggaccaagaaattataatacattttttatcatcaaagagttgcatcaaccaggctatagcacaaagtctgattttcagtactgcctcatgacagtaaatatgcattttctagaatggtgctgtccagcagaacttttgtgacaatggaaatattcagtagctgccctgtccgaggcagtagccactagctacacatggctactgagcacttgaaatatggctggtgcaactgagaaactgaatttttaattaattgtaactaatttaaattggaaaagccacttgtgactagtggccatcaagtgaacacagttctggaaactggataattcagatttttttacctagcatctagggaattggagatactgacttaaaggatataattattttttaaaatagggcttctaggctgggcacggtggctcatacctgtaatcccagccctttgggattccgaggcaggcagatcacctgaggtcgggggtttgagaacagcctggccaacatggtgaaaccctttgtctactacaaaaatacaaaaattagccgggcatgttgtggtgcacgcctgtagtcccagctactcgggaggctgaggcacgagaactgtttgaacccgggaggcagaggttacagtgaactgacattgcaccactgcactccagcctgggctacagagaaaaaaaaaatacagcttctagtttagtgaagaaaagggcaatttgagggagagaaaaggaactgcgttctgtgtgaaaggacagagaagcctggtgatcagagaataagatcccaaggcacttcactggggctgacattcagggagcctcctggaagaatcatttcaaaagcaattgcagtcaaaacagattttgagagcactcttagacccagaaatgtatagttgtctgcatgtaagtgctaaggctaataaaaatcagaagacatttggaagacatatccttgaattgaaaaaaataataattgaatatagcaaatgcaagttcccacttgttcagcaatctgtttaacttcttatcagagtcattgttaatacttccttttgttgtacatgccagtgcctggatatctaacgtacaatttcttgtgctgtcatttccactttccttttcaccaatatgaccagtaaatacagtaagaaatagacactattgatacagagcctggatagtcattaataacagtaatgttagtatcgtattgagcactcactatgtgtctaagcttttgacaggtatttggaagataggtaagcactggataagtattagttgtttgttgctacatggtgtcttcactctaagagatacaatttttaattgtgatggaaatgtagagggtcactggtgtttatccacatgggagctataactaagaatagatggaacaaattcatactttttctaatgggggaactccaacaatcttagctctgagaatttgcagaatacagatctaaaagagggtggaacgaataagggaggtaatacatccagaagcagaaaaaatgctgaaaaaagctaatagctgtgactgagttgccagggaccccttctgggaccaggcacacatggttgctagttgaagaatcaaacaaaacagttggaagccaacagagggtggggacagttgtgtttagtaggtcaggagtcacataccatactgcactaaaagtatatagctaatgcatactgctgcaaacctgcagtagtaaaaaatttgacttcacattcttatcaagtcttttcattgcaaaaaactttattaggcaaaagttacttttacgttttaagctgaagactagaataactgctatcactaaacagagagagtggatacataaactatttaatcattcttcttgcagttttaaaaacattttctcatctctcattctcccatcccctccaccccattcccctaacatgaattttgtgccatggttccattttacaaggaacagtactagccccctgaggacaccaggaaatggtaacctcacaccctgcattagtagaattgaaaatctgtttttctgccatttatccttacagtataactctcctctttcacattctgcaactgatctagtgcttaaaacaaatggagtcttcaaaagcaccaatagacaaggataaaattacacatacagacagagtttccatatgagaacattaatgtaaaactgggcagagggtcagtttcttagtctcttcattctctgagagagttttgtgatggatcagaatgtaattgctccctctttcccacccccagggaaaatatgtgtctgcaagagcttattatgagagagccttacagctggttccagacagcaaactgctgaaggaaaatcttgccaaattggatcgcctagaaaaacgattacaagaagttcgagaaaaggatcaaacatagcaccaccgtctgacccaacctcataggataatgtggtgcctctgaaaggggagtgatggaagccttgctttcacatcagcaggggcacaactaatgagattttctctcattccgagttcagggtgacacattttgggacatctgctggtagcccagtgctgaaggacttgcttttccatgaagaagacgaaaacagcaaacaagggcaagaaggtctgagagggaaggagaatgacatttacacattttacagatttttgtttggtttaactccagatttctcttgatatatctctgtgcttttgagacctggagatctaattctgtttagacattttttgtcccagaaatacagaagcttgaaatgctatgaaggcagagcttctattctttatgggatgaaatatttcaaaagaggataaatcctctgtggtaagccatttggaaaatcctaccaagaattggcttatttaattttccagaaccaggaatgagtatctaatagcttttgtagaaccttccagaatatgtggggaaaaagggctattgctaagtgagctttatctaatatcctcctaagagttttactagtgcttttttgaggaattacagggaagctcctggaattgtacatggatatctttatccctagggggaaatcaaggagctgggcacccctaattctttatggaagtgtttaaaactattttaattttattacaagtattactagagtggtggttctactctaagatttcaaaagtgcatttaaaatcatacatgttcccgcctgcaaatatattgttattttggtggagaaaaaaatagtatattctacataaaaaattaaagatattaactaagagaaatgtcctactttattatcttaatgttcagacatcatgagatttattatttttttgaaaaatatattgaaccattgaggaacctttatgatgtatcacagaaatcttcatagattctaactagatggaaaaagagctctatttatttgtgttcctaggcttaatgagaattctgggcttagaacatcaacgattaatacccagaattctttgttttgagaatattatggagaatgctctaaaaatctagggtaaagatctaaattcaaattttaaatatatatttatatttaagaaataggaaaggcaaagttgaactcacaatttgacatttatttttagtgttatttatttcataacttataaaatatttaatatatacatacacactcttcttttttctctgtacaaagtggttttaatatcagctttcaaaactgatcttataaaatgtaaatctaaattgtaaaatagttaagttttaacagtccctcccaaactttgtgttgattattcacttgctaaagagatgtgaggaatcagccttcagttttttggcagtagtatattttggaagtgaagaaattggaacacctgtttctaatttggtcttcatcattagagacaaaaccaaaacactccaggcagtactgtttatagtgctgagccaggtagcacacagacatagtagcctaaaggctcacataattcgcatgctcaggccagggcagggtaaaaatagccttctgcttctttcaacccagtatcaggaagcactaccccagtgttattatttgttttgtcaaggtaagtctaaataaacaagaaaaacttcttcggaaggcatggcgaagggagtattttaaatgaaaatgattacagaatttgaattagcatgcatctctttgtgtgcaacagtaatccaagaatgtatatgttaccactacaaccatttgtttctaatagttttttcatgttatataacataaatgtatccacaaccttaattaagaactattcttcccccaaaatcatagtcctagtgtcaagaaacatactccagtgtttattgtaaaataacaaccacaccctcaaattgaaaaaagtgaatgtctaggactttattacaacttttcagaataatctgtaatgaaaactcatgcttaaaaatttaatggaaaagactgagccccaaattttgaatagtgattacgccttacttgaagtgctaataaaggtaggagagtacatttgttggaataacagaaatggtgatttcagcctaaaagtttctgagggtaaaggatcacatgaccttcaggaaactctctgcctcctgtaggtgctttcctatctcccccatccttccctaccccttttcccttttccttcctctctttttctctcactgtcactctgtctacacacactggcatcttttgaacactaaaagtaagcactgttttttaaaaaagtaattatttgttggatcagatacttttatcccaagtgaataccttcactgagatgtggccaatgcaatagtttcacagtaaaaacagtgcctataagaaaatagatcacatactatttttcaatgatattaagtgtattttgtaactattttcatttggtccttgtaacatgaaataatacatggaacttacctttataataaaaatggagtgccctggttcatcatagaggtgcatctagtttgcccttaatggaagtatacttgctgtgtggattgatagcaccttcttgaaatggaggagctcagctggcctcatggatgtgcaatttttgcagtcccacagggccttgcatacagaagcaccccgagctcagttgaatgtctgtttgattttttcttatttatttttttgagacacagttccactttgtctttttgtcacccaggatggagttcagtggcacaaacatggctcactgtagcctcgacctccctggctgaagggatcctcccacctcagcctcccaagtaaccgagactacaggcatatgccagcatgtccagctaatttttgtattttttgtagagacagggtttcaccatgttgcccaggctggtctcaaactcctgggctcaagcgatctgcccacctctgcctcccaaagtgctgggattaaaggcataagccaccatgtccaactgaaattcttaataattaataatttttgagcaagaggtccacactttcattttgcactgggttcccaaacaggtcctgggtaggaaggatggctgaggataaaacaggagttgctttggcctggctgaacatttgaaccaatgatcagagtttcattttatgattgtgttactctgaacagatttgctatttttttccagctacatttagagttcctcatgtatatatcacccctctttttccagtccatctaacctctccttttttttgtgcctagaatcagttctccttgccttcaaaatccctgataagtgtccatttctttttgtatcctttgatgtagaagccacaagaatggctttagcagcttattttaatcttatgaattattcattcaggattttttaaatgattcagatgctttcaatctgttaacagtatttataaaacatgtttcagtgatacaacataggtgaactaaaccaaagatgcaaatgccttggaggaaaagaaattgtattatagagaatcctgagatatatccttttgggttgtttaatttaaagcctatcacaaaacaaagagaattgtcgcactttaattccaacctcctgcagtacttcacaacccttagcataagattctgaaatttgtaataggtggtacctagtttgatgcagggttttgcagcagttgtgcgaatgcctctgcgcaacggcctttcagtcagactaaatgagaaaatccaaactgtcctatcaaaactgacccacaataactgtactctgaggcgaaacagagcaaatgtgggtttcctgttttcattgtaaaacattccaggttctcagattgaagagctacattcagctgatagttgacatctgttccctcacacgtagtggctctcaacacgggctgcactttggaatcacctgaggacctttcggaatcttcggttgaatcatcctggctgtcctggtgatgcttcttatgtgcagctaggctggagaaccactacagggctgacacctggaatgggagcttgtaacttttacaaaataatagatgtttatcatcttttgcaatttttacttttaagtctatactaaaatgagccaaagaagtcttaacaatgatgtatggcacaattggttggttgaggctatcattccatgattacaaataggtggttatgtggggtggttttgcacttgtggcaattggactgcaatttggccttaaaatgacacaattcctcgttctcagatggagaggaattgccttgaaatttgcatgtaccagactaagtgccagtatatatatgactgatattttcgtgactcatagaaggtgtccatggtatagagtttatgcctacatctctatctttattttgggcacacatgagcttttgttaattatttctttgtacttgttagaatctgtttttgaaaaaaaaaaaaacttttgctttgatttgtggtggattcaccttcttaaaataataaatttagaggatattaggaatgacattcaaaacaaatatagtgagaggtgattttttaaaaatttttgttcctggtttccaaattatgtttactttgatttgattatatgttggtatctcccaaatataggttaacttagctatttaaatggtatcttttgacatttaaaaagaattaagtacctgtcaaatctagcattgaggttgcagttgaataagataaaagcttaggatgtcaaaaaataatatagagaaatattataagattttatgattattcttgacgtttttgatgcaaaaggaaaatatgctgaatagttcttccaaaaaatattatttccctcaatattttatttgtagccatgtaatttaaagagaacagaaaataactgcaatcaaaagtatggtttaatatcaatcaaagtggcacaacagaattgataagatctttataacaatcaattggctgatattaaaatattgattttaattgatcttttcaattaaaatctttagggcctgtaactcataaaatcagcatccaccacaatatatggtcattattggtttgtaagcatagatcaccattgactcctacctggagagacatgtctatttctaaaaatccagtagtttctttgcattctcagtagtacacgttgtatatatatatatgtaacaaatttggtagttttcagtatgtgtgatgtcctttgggggttatttatcttgctggtccataggaggggtacactaccccaagaatcaagacatctgagttctagttctagttctagctctgccactgaagagccaccttacctggggcaagttagccattgtctcccagtcatgtttaccacccatgaaaggactcgtcggtttgatgtttccattaagctcaatgagtaactctaatagttactcttgaatctggattgaaaaacaccatgcatctgatgagataattcataaatgttgccccttttttaaatgatacaaccctaaaagtgactgaattgcccaagtgcttgaacatggcagaggtagttactcctattttgcagtttgtgcacttaaaaattcctacagtgattgttactttactggggaaaaaagatgaggtgaaacttcctcccaaggaattaaaatatctgtagaagccatggcttgcttttataatgtggaaatcatttgatttgctgtaattcacgcagatccctccttttgtcagggggaaatgatttgcatcatgttcttttttcataatgcttttacttcctgtttggatcagttgtatgtaaatgtacatttttgttactttggctgtgcccgttagaatttatcttccataaagtatttctcccattgagtctaatgatgtatactttgcctaggtctttccaaaattaaatttatgtaaatgtctattttatataaaatatgattaaaataagtatgtctggtttcaatctc

SEQ ID NO: 1530 - DNA, 364 bp, Homo sapiens
aaccaccatcaaacaggattttcgcctgctggggcaaaccagcgtggaccgcttgctgcaactctctcagggccaggcggtgaagggcaatcagctgttgcccgtctcactggtgaaaagaaaaaccaccctggcgcccaatacgcaaaccgcctctccccgcgcgttggccgattcattaatgcagctggcacgacaggtttcccgactggaaagcgggcagtgagcgcaacgcaattaatgtgagttagctcactcattaggcaccccaggctttacactttatgcttccggctcgtatgttgtgtggaattgtgagcggataacaatttcacacaggaaacagctatgaccatgattacgc

SEQ ID NO: 1531 - DNA, 247 bp, Homo sapiens
gaatggcagaaattcgacgacacagcgagcgaggaagcggaagagcgcccaatacgcaaaccgcctctccccgcgcgttggccgattcattaatgcagctggcacgacaggtttcccgactggaaagcgggcagtgagcgcaacgcaattaatgtgagttagctcactcattaggcaccccaggctttacactttatgcttccggctcgtatgttgtgtggaattgtgagcggataacaatttcaca

SEQ ID NO: 1532 - DNA, 686 bp, Homo sapiens
  misc_feature (95)..(95): n equals a,t,g, or c
caccaaggccagtttggaagcgaacggctaccccgaaattaagatactacagcgtgagttatgagaaagcgccacgcttcccgagggaagaaagncgggacagttatccggtagccggcagggtcgaaccagaagagcgcacgaggagcttccaaggggaaaacgcctggtatctttatagtcctgtcgggtttcgccacctctgacttgagcgtcgatttttgtgatgctcgtcaggggggcggagcctatggaaaaacgccagcaacgcggcctttttacggttcttggccttttgctggccttttgctcacatgttctttcctgcgttatcccctgattctgtggataaccgtattaccgcctttgagtgagctgataccgctcgccgcagccgaacgaccgagcgcagcgagtcagtgagcgaggaagcggaagagcgcccaatacgcaaaccgcctctccccgcgcgttggccgattcattaatgcagctggcacgacaggtttcccgactggaaagcgggcagtgagcgcaacgcaattaatgtgagttagctcactcattaggcaccccaggctttacactttatgcttccggctcgtatgttgtgtggaattgtgagcggataacaatttcacacaggaaacagctatgaccatgattacgaattcgagctcggtacc

SEQ ID NO: 1533 - DNA, 364 bp, Homo sapiens; identical to SEQ ID NO: 1530

SEQ ID NO: 1534 - DNA, 288 bp, Homo sapiens
attaagcgcggcgggtgtggtggttacgcgcagcgtgaccgctacacttgccagcgccctagcgcccgctcctttcgctttcttcccttcctttctcgccacgttcgccggctttccccgtcaagctctaaatcgggggctccctttagggttccgatttagtgctttacggcacctcgaccccaaaaaacttgatttgggtgatggttcacgtagtgggccatcgccctgatagacggtttttcgccctttgacgttggagtccacgttctttaatagtggactctt

SEQ ID NO: 1535 - DNA, 288 bp, Homo sapiens; identical to SEQ ID NO: 1534

SEQ ID NO: 1536 - DNA, 7173 bp, Homo sapiens
aatgtgtttgtatgttttttttttaggagatcatgaatcagacagataaaaatcaacaagaaatcccatcataccttaatgatgaaccaccagaaggtaagtatgcatctgtaacactaagaatggaaaaatatactgaattaaagttctgatagtttttattttttacttattttattttatttttttttgagacagagtcttactctgtcaacccaggctggagtgcaatggcacgatcttggcccactgcaacctccgcttcctgggttcaagcagttctcctgcctcagcctcccaagtagctgggattacaggtacctgccaccacacctggctaattttttgtatttttagtagagacaggggtttcatcatgctggccagggtggtcttgaactcctgaccttagttgatccacctgcctcggcctcccaaagtgctgggattataggcgtgagccaccactcccagccctgattgtttttattaaagaaatataacctgtttaccttgtcagtaaatatgtccccaaaataattgaagataacatttttagcttctaataagaaagcatagatagtggtgaatagggacacaattttaccatataaggcataatattttgctgtcattcttcttttaagaccattttagaagtataagtatcctttcatttgtaaagggtgaggatggatacagaggaaggatggactgtgtttagttttgatatcctgcatacaaaatcagcctaatgcaagaggcattagagatctgttgttaaactcctattattcattatattgtaattggtacctctcctctattaacacatgatcttgggatctgcttcatttgtctttttaagtcataattctctttgagtttgaaaattgtgttatcatgaatcattttaattcttcagaaacccttggaaacacacctgaatgtcctgagtacatacagaaaatgactagaggcatgtttttggtatagactgttactaaacttaatccaaatagtgatctccttggagaattgcatgttgattactagggctggaggttgtgactctaggtattatatattttttcctagttctgttacccattgtctaaaattttcttcctatatttcttttattggtaggcaaaaatgaaattgctaggaaaatagcaacaaagggtttacacttaagccataaagaattcaaaagaactatcggagattgcagtgagctaagatcgtgccactgaacttcagcctgggcgacagagtgagactccgtctcaaaaaaaaaaaaaagaactagctgattaggtttagtttagtttggtggaggaatagcctggaaaattactaactcaggtcttttccatgccttacatttttaggtctggaaccatggagttttgaaaagttagggctcagtgagaaagttaacaaggactttgtgagaaagaaatcagaaaagggataaataaaggccatccaggggcatgattgtcaaggaagagaacaaagcagaatgtctttctatgccaaccactaaacaagaggaatctgcaaagcagataatttatatggtgataattaagagtatactgtaataaaagagatcagctgcattaattatttatctgacttgattaagaacaattatttgtcttctttaaatgcatgtgtaccaaatttggcatggcaagatagttttactaatgagatatttggcatgaggcagttatctgttgtagcctcaaatcaggattttgccttttttcttagggctagtgacctcgattacagaattaccaattatgtaatcctttccatcataattttataactaatatattcaaatgcccatctatatattaagtcttttacttcagtcattaaaaatttgtattaactatacttattaagtagttttaataaaaatatttggtttttaaagtttatagctattgctgtatctgtatttatgcactattttgcaaagatattttgactagtcagtgagattttcccacttgtgataaaatgtaaaatcttcagacaatgaaaagaaaaattatctcaaggtaaatttgtgccttgtgcattggaaagctcagttttcagaattttttattttctccatcaaatattgtcagtttccccatgataccttctctgagaacttgattctgctagaatctaatagttttggtgctcttagttggacttacgtacccagtaatttacccctctttttcagaagtaaagcttgaattgtgtaagtaccaaatatttttccatgaagtttagaaaaacactaatgcttatgtgttgttgctgcttaaattattaggttactaggccgggcgcagtggctcacgcctgtaatcccagcactttgggaggccgaggtgggttgatcacgaggtcaggagattgagaccatcctgactaacacggtgaaaccctgtctctactaaaaatacaaaaaattagccgggtgtggtggtgggcacctgtaatcccagctactcaggaggctgaggcaggaaaatggcgtgaacccaggaggcggagcttgcagtgagccaagatcacgccactgcactccagcctgggtgacagagcaagactctgtctcaaaaaaaaaaaaaaaaatattagattactaaagagaaaagacctgtgttcactgtgttcattttaagctagtgcaaatttttatgaaatctttctgctagtcattttattcctaagtttgagcttacatgctaatatatgtggctctatttaaaaaaaaaaaacaaagaaaataaactcatgacttagagcttaatttttcatattgctattgccttttatgggggatatctctagtttttaaaaactagatacttaaagcacacactctctttcataagaattactgaggcagtaattttaagtgttaaccatatctatagtttctctatcctacttatgtctgaataaaaatgattttttaggtagataacacgattttaaatgatgaatagttttttacttttacatagtattagctctttaaatacgtcagtaagggagacatagagcagagacccaaatgtatttacttaataggggttcttaaactttttggtttcaggatgcctttacaatgtcaaaaattgaggccccaaagagctgtgtctttgtcaatatttaccatattagcaataaaaactgagaaatttgaatattttatgcattaaaagaacccatattaacataattaaaatatttttatgaatagtaattctttcaaaacaaaaaaaattgtggaaattgtgagcaaggtgatactggtttatacattttagcaaatctctttaatgtttggattaatgcaagacagctacattcttgcagctgcttctgcattcagtctgttgtattatacatcattctgcttctggaaaactgctatagactcatgacagaaagtgaaaagacaaatgatattttaataatattatgaaaatagtttttaccttgtagaccccctgaaatggtcttcggcatctgtagtggtcccagaccataccttgaaaactactgcattttacgaagaagattgtttcggtaatgactgattaaatcctatcaaggaaatgaaggccaaatgtagttatctttttattttttcatgttccttttaggatgtaaaataaaggttatttgttaacaaaaccgtaaaccaaggaaacatttaaaataggattctgttttacaaaagttgtctagtctctaaagcatttcttctcatagatactaagacttagcattggaccaagatattgtaaaaacatgtacaactataccctgaaggaagagctcttcagtgtctttgaatcagtgtggttggccttatcaaatcaacctcctgttgtgaggaagtcttaggttacttaatgatgtgtactgctcttttaaagacttgtgacttatatttgattgtctcatgatattttctctcattaggttcaatgaaagatcacccacagcagcagccaggcatgttgtcccgtgtgactgggggtatcttcagtgttacaaagggagctgttggtgccaccattggtggtgtggcttggattggtggaaagagtctggaagtgaccaaaacagctgttacaactgtgccttccatgggaatagggctggtgaaagggggtgtctctgctgtggctggaggtgttacagctgttgggtctgctgttgtaaacaaagtgcccttaacaggaaagaagaaagacaaatctgactgaaatatagagatacacttgcgctccacagcactgtaatgccagtggcattgaattgctaaattatggactacaaccaagtcaactgttttggacgtttatcttctaaactgctgtgttgaaagtattgatgactggctttcatctaaaaagaagagaccaatacgagcacagtatatgaaggtttctcatacttaagttccaggtttttatctggtaaaatgttacacttactcggttgtaactgaagatatggtatgtttgaatatttactataagtctttcagtttgactaaaaatgtgaaagttgaatttagtagatgatcttcacagttccatatgtataatgtgccaggtaactcacctgccccttaagaagggaaccttgaattacataagccgtacctttgatgtgcctaatagtttcagatgtcttagttttttataaccatagttgattaggccaagaggcattcatttcttatttaagctggcaaaattagcaggaattagagaagtttaaaaagataaatggttttatgataatgttaaccatcttttgttagtaaatatgcgttctattattttaatcattgatgccttacaaaagaaaacatcttttctaataccctgaatatgtgctgttcttagaatcatctatggattcttttaaaggttgtttgtgaaattagttttccctttttagaatctcaggagtagtggggtaaagacatttcctgctgtcagtggataagacagagcttgttaactgttttggcagtagttaaaatcaaattgtacacttctcagcctgggttcatgcttcatcattaatacacctcacagtgcctaaggaacatttacttactggtcagaaggtattttggaagagtttcatattaaggaggaacaaataataattttaagttcttaaaaattacctaaaacaccccaaatataaaaagaagccttcacacctattctgtctttaggatgtcttaaattattagcagtactccttttttaaaaacactgtaaaagtaaccacaaatatgtgaggacttactattttaaatggaatggaatgagctccatagattagttttgaatataaagtatataaaagtgcatcagtggtttatataggctttaaaaacatgttatcttacagtcctttaaagcagccatagagtttgtatcatttttcaagccaatttcagtcagggatttgaattgtttgattatggatgataaatgtgtcatatcttattaatatgtctcatgtctcgttccttcttaatatgatttagctggaattcattttcttttcgtttcatgtttaatttcataaaacgtttaacaattggcatatatacttggcattcctgtccaccaaggattgtaatccaagcctgggaaaatcttaaatttctttttacttaaatctggaaatttgtctccattctgccacctttttttttttttttttttatagtggaggggaggaaaggggggtgataccttgcagtaagtaagtcgaaatagcatgcctgaaaatttgaaacagaccattctaacacccaaggcttgtttataaaatacttgagaattacattaatgtggaatcaacagatgcagaagaatataacataacttttaaaagctttcataaataccagcagcaattgtaagcaaatctacaaaggttcttgaacctttctattatatacaaaactgaaaagtcattaaggagttcaactaatcaggaattaaatggtcatttatttcatgcagtatgatttaaggtatttcttgagattctggtcaaatgtcataatcagcaaacgggattaaaaaaaaaactccaaaatcactaaataattatctaaataatggtattggagaacttgtttcctgctatttggaagagattgttgcttcattgctagtttgtatttctaacttctacagttatagactccactgtgctttgtgtctgaatttctcagtatagacattttgtttactgtatgcttgcatatttattttcaactttgtttgtctttaaaattgcttgaggaaaaatggttgtaattaatttctgctacagaaaagccacctggtacgttttgtctcatcaggattgttttaaattctaaactataagtttgttcagaggggcttttgcaatgatagcagaaaactgtacaaatgtacagttagttatagaggttcttgttgaaatgaacttaccatctgatgatatgtatgtacagctgtgtacttgagtcttttttagtttacttagaaagactagcagtttgacctgttaaacaggactagttcaagtcaagaaactaaggttgttgtatacacctggaggcatctgttattcagcttatcctttgagtgggtatttggcacaatgaggataaacttatgtgacccacttgaatggctgatctaataatgttgacattatgcattctgtacttagtgaaatgtcagatgaaaataactgatgaataatttttttgtattaaagggatgggaaaagaacacatgaatttgttaataaagcactatgatctgcaaacgatggaatgtttcataaagatctaaagaaataaaggaaactttaaaacagggtgatcttaccatttttagttactttgcagttcagaaagtgctgtagccagtttaaaattttttttatagtaatgtacaaacatatctttggatatgtattttgatgctgacacaaccatgaaatacaaatatattttaagcaactctaataataaagattaagagtgtagatttctaggttttaccccaacttgccaaatctctgcaaggtggggcccag

SEQ ID NO: 1537 - DNA, 39339 bp, Homo sapiens
ggggttagcatagtggagcggcaatatatccaggaccggattccctcctggactggagccggcttcgtccgagtgcctgaaggggcttatttggagtttttcattgacaacataccatattccatggagtacgacatcctaattcgctacgagccacaggtaaagaaaccacttagtggactggtggaggagggaggggagaatcagtagaaaaatagtacttctaatgggtattatatatagttatgaaatatggaggttgcattagaacagatcagattcctatagtctcacctcctccatggaagttaaaataaatgtaccattttctttctttcttttttttttttttttttgagtctcgctctgttgtccaggctggagtgcagtggtgccatctcggctcactgcaatctccgcctcccgggttcaagcgattctcctgcctcagcctcctgagtagctgggattacaggcatgcgccaccatgcccagctaatttttgtatttttaatagagacggggtttcgccatgttggccaggctgatcttgaactcctgacctcaggtgattcgcccgcctcagcctcccaaagtgctgggattacaggcgtgagccaccacacccagtcaaaacgtaccattttcttgaatccagtttctcaaacgtagtgatcttttgtgaggcactcaaccttgctgacgactgaggtggtgatgaggatgtatgagatcctctccttccctcacaacctggctgtgcagtgacagactgaagccccgaactgtaacgaaagactgaaggtgacggtgtaacagcagagagatgcatgatcctagaagatgggcatgcaccagccagcccgagccagggctaccaaaacgttttcctagagaatcagagctaggccttaaagtgtgaatggaattgtggaaagttggcacaaaagtaagaaatagtgtgagtggaagagagaagagagggttttgtttttattgagaatcattccacatagcttgatgagagatatggttggagatgctgttggcaaaaatactaggattagtaaaggaatttggactataatattcacaggaagctattgaagcatttcaagcaggggattgtcattatctgagctgctttaaagtggactgaaagggacattgggaagaggcagaaaacagttgagaggtgtttcagcatccagggcagaagggatttgggctggaaccaggggagtagcagaggtagtagtaaagagaaaagtgaagagcaactgtttgttttccatttcaacttggcaattgattgattcagagaggtctttttataaacaggcagtggtgggctaactatcttttcattgtttgtttcttattctagctacccgaccactgggaaaaagctgtcatcacagtgcagcgacctggaaggattccaaccagcagccgatgtggtaataccatccccgatgatgacaaccaggtggtgtcattatcaccaggctcaaggtcagtgtgacggtggtttggcagctcaacgggcttcatatgcaaattagtatttttctaatattttgcgagttttcaagtcaccatttcagagccagacgttgactgctgacttttttcctttggaattatcgatgcagagctttgtttttaatttttattttttggatgcatgaaggttgactttcgttgttgtctttcttttttgtttgggggcagatatgtcgtccttcctcggccggtgtgctttgagaagggaacaaactacacggtgaggttggagctgcctcagtacacctcctctgatagcgacgtggagagcccctacacgctgatcgattctgtaagtgcgagattgcttctggcatatgcaggaaagcctgggcggaaagtgcccagctgctctcagggtgttttgttgaggggtaatgctgaggccagcgtaagcagaatcattctttcttgcctccacggttactttgcttatactccaccccatggaaaggatttattccttctaaaaatataaaatgtcttttaaaaaaaacagcatttcactaggcgtagtgactcacacctgtaatcccaacactttgggatgctgaggcaggaggatcatttgaggccaggagttcaagaccagcctgggcgacaaagcaagaccccatctctaaaataaaaataaatagcatttaaaagccatcaagctgtgtaaaacatatctaaaatttcctgccaagagtatttaggaatagggaggtttatactttatttaatgagtctaatgatttctgttcaagggtcaaagaagcatttgggttttctacacgtttgcttgcttaaacccatgccatggggcaccactgtaaggatgtttggccgttctcatttcttcacagcttgttctcatgccatactgtaaatcactggacatcttcaccgtgggaggttcaggagatggggtggtcaccaacagtgcctgggaaacctttcagagataccgatgtctagagaacagcagaagcgttgtgaaaacaccgatgacagatgtttgcagaaacatcatctttagcatttctgccctgttacaccagacaggcctgggtaggtattgctgggcagctgcagcagctgctgtttctggctctgagtatatctggcacatgaagtacagtggagtgcccaccccctagccctgtgttaggcagcacaagggaaatagtgtctcagttacagtttgtctttatctttttaagtaatatttcagtgaaagagcaccactgaagatggaattgatattcaagaaatatgcaaataacaggtgaccaggggaaaagtccatgaggataaagcatttccataagcagggtagggagaggggaatggaatcagagaagcatcaaatacctgaaatgtatgtttttctctttgaaacgtcagaccatcctctgaaggtcactgggctttggtctaatgtcctgtgatatttgagctttgaaggcaaggggagaaaacattaatgacctcctgcctagaaaaactgttttgatctgccaactctgcctcccctttcttcccttccgctcatcatagggatgatactgttttaaaccagaactctgaataatccaaagtagttaaaggagaaaggatcagggagagcccgatgatgtgctgctccgtgtcatgggttctggcctctctttacccacagcttgtgaatgcgaccctcagggttcgttaagttccgtgtgtgatcccaacggaggccagtgccagtgccggcccaacgtggttggaagaacctgcaacagatgtgcacctggaacttttggctttggccccagtggatgcaaacgtaggttcctcaaaagcattgttatgcattcattcagattaactcagccattgtggcagggttccattgctgcagagccgatgcttccctcctgaagttgatcacaccaacccatgagcattctgaattggggacagggtgcttataaaaggagcatgtttccattgaatgagtttctcaaggcagttccttgtttgcctgtttctttagcttgtgagtgccatctgcaaggatctgtcaatgccttctgcaatcccgtcactggccagtgccactgtttccagggagtgtatgctcggcagtgtgatcggtgcttacctgggcactggggctttccaagttgccagccctgccagtgcaatggccacgccgatgactgcgacccagtgactggggagtgcttgaactgccaggactacaccatgggtcataactgtgaaaggtatgcagatgctgaaagtaaggagaatgtagtgatctctggctgagcagacagcatcttagaccaaccacagaattcatctccaccaggcttcagctcgctcattcatttctgaccacctcactattttctaggatcttgtttgtttatccagtacatattgagttgacatcctctatgtgccaggcaccgttctggtgctggagataccgcagagaacaaaactgacatgaatccgtcctcttggcgagtcaccctagagcttaccatagggctgtatagaaattctgtctgtctcagcagattctggcggaggataagagttgtgaaatgctcctgcctaatttaggcgaaaggagaaactaatccaaatgggattagtcattttaaatagctttgtttttcagaacgttttatgcaactacagtttccaggagactctataaaacatgcctaagtagatctgttctccagttagcaaatgtcagttgaataatcattatggatgtgctagatgtagagtaagaataggagagagaatatacctccataacattaataggatagctcaatagataaaaaatactccgtatgaaaaagttacctgctgacttacactgtttattactaattaagaaatgcagacagtactgttagaactggctttttgggcgtaatagtctccaccttttcactgtgataatttttctctcttccaacatccattcgccctatcgaagatatttgtttttaaaagtcacttgtgaaacattgcagcaagtgcttcagtcagtggtgaagttactcatcaggtgaaagagaaattgttagtgaaaaactgagtatgtgattaacttttggcatgaagatgttcatggaggcaaacacgtggctctcggctcaatgctagaacggtactcaagaatttggaggtcccacggactaccctttgaataaaaattatcccttccaaccttaaaattgtgttgtagaaagatagcaaggacacagttatacaacagtgaaaggaggaaattaatattttggggtcatctttttcttttcagccgttttccattattgttttttcaaagagagatggagaataagtacgagagaaagatatgagaaaacagagaaagacatgagaaaaagattaacagggagcagagagaggagggggaacagaagcaaacagcaaagggagctgccacaatgctgattcagaatcagcactcacactgtagaatgcatttgaacgaacatcatgtcagaatggcatagttgatatctgtgaccagctttggattttatttgtaaagggttttgagaatgagaaagggtatgggagaaggaagatttttaacaataggtttgggtggcaaacacttgattttaagtatttggaattctactatctagtttgagccagtttctcatcattcttttttctcattccaagataaccagagtttcaatcctgtgaatttacaaaaaaactctacacttagattgtccccaaggggaggcaagaaatgaacactcagtttctatcatgatgtatttggattgcctccaaaagacttgagaaacaaattgaattggaaatccttggacctcagttcctggcccaattctgcttctaacttgctttctaaccttgggtgagttaggatatccagcttctagaaaatttttttgagacggagttttgctcttgttgcccaggctgaagtacagtggtgcaatctcagctcactgcaacctctgactcgcaggttcaagcaattctcctgcctcagcctcccaagtagctgggattacaggctttttgttgttgttgttgtttgtttgttttgagatggagtctcattctgttgctcaggctggagtgcaatggtgcgatcttggctcactgcaacctctgcctcctgggttcaggtgattctcctgtctcagcctcccaagtagctgggattacaggcacaggccaccatgcctggctaatcttttgtatttttaagggagatggggtttcaccatgttggccaggctggtctcaaactcccaacctcaggtgatccacccgctgcagcctcccaaaatgctgggattacaggggtgagccaccgcacctggccggaatatccagcttttcataagtagaataactaggttggatgagattgtctccaaagttccttcaagatgttatgttgtaggacataaaaaagtaacataattaccattcaccttgacaagcaggctaacatagtaaaagaatgtattgctttaaggaccccaaattcaaattctggctcattatttaactagttgtataaactttgagaatcctttgacctccctgtatttgttatctttaaagagtgggattgacatgttggatatgggaattaataagtaacatgacccatccctgcctgagtttggaaccacctgagagacaaacacaggggctacacagctggagagcacccctgtcaccccctcagctccagtactgggaaaagctgggttatagcacatggctttagacctgtggccaccgtgggcttgccaacacatcacccctctcaggcataggcagaggctgacaggtataagccccgcctaggaggacagactctgtaatacaaggagggagcagaactgaatggtcaggacaggcaggcagctgatagaacaatcaagtgcacatggggagaggtggctcttcctctggggagcagtgagtgaggggccagatgaagccatgggtgtcactcgaacgcagtggtcctgcaagtaggatccctagatcagcagcatcaatattatcggggacctactgaatcagaaactcggtgggaggagcccagtcatctgtttcaggtgattgtgattgaagctaaagtttgagaaccactgttcccatagtaaatcttccacatgaaaacataaagagaggtgggcagatcacctgaggtcaggagtttgagaccagcttgaccaacatggtgaaaccccatctctactaaaaatataaaaattaggctgggtatggtggctcacacctgtaatcccagcactttgggaggctgaggtgggtggatcacctgagatcaggagttcaagaccagcctggccaacatggtgaaaccctgtctctactaaaaatacaaaaattagccgggcatggtggtgcatgcctataatcccagctacctgggaggctgaggcaggagaattgtttgaaccaggaggtggaggttgcagcgtgctgagatcgtgccactgcactccagcctgcgcaacagagcgcgactccatctcaaaaacaaacaaaaaaacagccaggtgtggtggtgtgtgcctgtagtcccagctacttgggaggctgaggcaggagaatcacttgaacccaaaaaacagaggttacagtgagctgagatagtgccactgcactccagcctgggtgacagagcaagattctgtctcaaagaaaacatgaggagtggagaagagtgtgcccaaacagaacagttttcaagactttccttggaacaggtttcttagaactgtggggtcatggcctgttctcttctgtgactgatgcaggtgcttggctggttactatggcgaccccatcattgggtcaggagatcactgccgcccttgcccttgcccagatggtcccgacagtggacgccagtttgccaggagctgctaccaagatcctgttactttacagcttgcctgtgtttgtgatcctggatacattggtaagtcgtgtgcatactttgggaggcaaagagagagaaaaagatgtctttatgagttcattgttaatgagaaaaaaagatgcaaagtgaaccaattaagtctacttttataatttttaattaaaaattagaaaagatgctcttttcctatttggcacatggagtggagtcaattcatattgagtctctgataagaacgttataacacaaagcaggaaagtaagctcgtggaaatctagaaaccctgtggaacacttttctgttattaaacattagaaagattaacttaagttttactcctgcctttctttatccaactcctagcaaaagtatctcaaagctgtgaggttaccaaatagtagtcagaagaaagaaataatatcatccagggaatcacaagatggccgaatatattcttcactgttaatgatactcacattatctatcaagattcaattaatctagctgggttgttaaaaactccctcttatttcatccttgaagccactgttacaaatactgattatgtttatatgtaactcagtaaaatttttttgcatataatttcagaatttcttagggaaattggtcatcattaaagatcccatttttcaggttgctcacagaggagtggtaacttttcagtttctgtaattctttgttttgttttgtttttgagacggggtctcactctgtcacccaggctggagtgcagtggcacaatctgggctcactgcaagctccgcctcccaggttcacgccattctccagcctcagcctcccgagtagctggggctacaggcacctgccaccatgccccaccaccacgcctggctaattttgtttttgtatttttggtagagatggggtttcaccatgttagccaggatggtctcgatctcctgacttcgtgatccacccacctcggcctcccaaagtgctgggattacaggcgtgagccactgcgcccagcccactttctgtaattcttgaattaggctgggtgtggtggctcatgcttgtagttccagcactttgggaggctgaggcaggaggattgcttgagcccaggagtaagagaccagcgtgggcaagatggcgagacaccatctctccaaaaaaaaaaaaaaaaaaattttacaaaattagtcaggtgtagtgccgcaaacctgtagtcccagctgctgggaaagctgaagtgggagaattccttgagcccggaaattcagggctgcagtgagctattatcatgtcactgcattccaacctgggtgataaagcaaggccccatgtcttaaaaaaatgtaatccttggattaggatttctacatgaagctatgctttacattgttagtttgctcccaacatgctccacccccatgtgctcagaagctaaagtctcatgtgctaggacctaactgtccacagccgctgtggcctctggggcagttgcaacactgttagagactacaaaacattagattggtgcaaaaagttactatggtttttgccactgaaagtaatactgccttcctctcacaactcaaagcctattctttccccttcagatgtgatcaccctgggctctttaaacagtgcagtgaagatgaagcaccgccacgatcagctctctctaggcatgagtgtcggtgcactggtgagctttcagtcaataagctaaacatcttgtgtttggttttatcgggtgacaggttccagatgtgacgactgtgcctcaggatactttggcaatccatcagaagttggggggtcgtgtcagccttgccagtgtcacaacaacattgacacgacagacccagaagcctgtgacaaggagactgggaggtgtctcaagtgcctgtaccacacggaaggggaacactgtcagttctgccggtttggatactatggtgatgccctccagcaggactgtcgaagtaagatgcacatttattctgcccacttcttagaatgacttccacctttttttcattatcagcagattttattcttcctgtatttatttcacttgggaaaacacttgttcagagaggtaaaatttcactttcaactaaggaaagatgagaccaattttttttttttttttaatgagacagagtctcactctatcacccaggctggagtgcagtggcatgatctcagctcactataacctctgcctccagagttcaagtgattctcatgcctcagcctcccgagtaggtgggattgcaggcaccccccaccatgcccaggtaatttttgtatttttaatagagacggggtttcaccatgttggtcaggttggtctcgaactcctgacctcaggtgatccacccgcctcggccttccaaagtgctgggattacaggcgtgagccgttgcacctggtcatttttatttttttctttacatccacattttctggcaggagtgaggtctcaagatgtgactcagtgcctgggagagataacaggaaagaaaaaccatgtagctgtccccatgataaatggcatccagtagagggtactgatggtatgctctgcccatgaacttgctggttggatggacttcgaaatcctaaatacccactgtggtcccaccttttctagtggcattgatggaatagagccttccagcttaaggaagagaaagaagtagcatctctaacatctctcttttggacctctttatttctctcttaccgagatcaactagcatttcctcttgctgcagctgcacagcccccaggctcctggctttgtttatacaaacatgtgtggaatgctagggaccagcaggactggattccttaaaagccttagtagcttaaagggcttttacctgctatgtccaacacgtttattacggctgttctctgccaagagtttgaaattattagatatctcaattcccactggcattttttaaaattatttccagttaagccttcaattttaaaatgactcaccagcatcttgtcaaatctgtgtattttgaacatacttttaggtgaaatgtgtcattgtgtgtatctgggaaatgtcagaactgtgtaagaaatcacgagaacttctaaacagtaattttagctttatttttgaatcacctccatttctttccttctttgcatttcaaggtcaagatgtgaagtgggaacatcttagcatttagatgtggctaacatccgcatgcctgtgtatttgggagtgtgacaataagtaaatgtgatgttcttttgcagagtgtgtctgtaattacctgggcaccgtgcaagagcactgtaacggctctgactgccagtgcgacaaagccactggtcagtgcttgtgtcttcctaatgtgatcgggcagaactgtgaccgctgtgcgcccaatacctggcagctggccagtggcactggctgtgacccatgcaactgcaatgctgctcattccttcgggccatcttgcaatgaggtgaggggctgctgctggggatgatgcctttatgagctcaggtgtcagcccatggtgactttgccccagttagagcaaggcaccagggcacacagcttgaaacacagcgtggcctggatcttagccctcatttgtaccccttggctgggtctacataactgtgcacagagtccccatcagacacatccatagcatttcagtagagggtcccagctgcagatgcagactcacttaacaatagacaagggtgtgctatttctcttcagtacctgggcgctgaagcagactcttttcttagcttctcgaaaggaaccaattagccatacccagcattgtaaaaagtgctgttgtttcctgacacatgctaaggagggcatactccctaagtcaggcgagtcaaaggtggcccaggattgtggctgatctgtgaggataaaagtgaggaaatatgtaaataaataataacatgccacagacctttccaagccctgttgcaaaagagcacttagatgctggcatggggctctcgacacctacgattgaagtgggagtcccttttcctagtcaatggagaccttctcaggtaaacagttcattcctacttctaagtggcagctagaaaaaaaagatgacaactggcttctggcctgaagcctgcttgaccaaggtctgtgttctggccgcagttcacggggcagtgccagtgcatgcctgggtttggaggccgcacctgcagcgagtgccaggaactcttctggggagaccccgacgtggagtgccgaggtgagttgtgggcgttctcgcattgacttgatcagagagtggagggaactggggttctacaagagccttctgtaaattataaaacacagtacaaattaacgtgtctataagaacctgtatttaattgcaaaataaattaacactgattgtttaaaaaacaatctaacaaatctagccctgcccataagtataggtagtcaagagtggatgtgcatactctcccggcctcacaccctggggtaaagtttgtttctgtgtgtaagcacacacacacacacacacacacacacacacacacacaccacaaatacacacagagctgctttttaaaatacttttaaccaaggtgggaccatgtgaaccctatgtttggcaaagtgactttttatcccctctgaacagtattttgtggccaacttccttgatggcacaagaagaggtaaatggttatcctagtaagatcactggattcagtggatcaactagactctgttgacagtttaagctcttggcgtatgtgtgtaagataacatccccaccagtgaaaactggagggcaatgtcatggagacttcgtgcacaacaaagggctccaaggtcaggggctccaagtcagtttaatgtgaataaaacccagattttcacctaagcttatgattaaacaaacaaacaaaaaaagatggaaatgacattttcttacaaacaaaaacttgttaaaattatgtgaatcatcaggattgcttgatttttatggtattgcagtttttttgacctggaaaattatttttcagatcttaaagtcaaaatatggaaaagactgaataggctgttgcaactctgtttttatattctttctttcctacttgattttcttccctgtttttaattgatcattatggataaaaattttctgtagtttcttaagtgctctttcgtatatttgttgcacatctgaaattataggtctctgttggactcttgaattttttttttttttgagacggagtctcgctctgtcacctaggccggaatgcagtggcataatctcggcttactgcaacctccacctcctgggttcaagcgattctcctgcctcagcctcccaaataactggagttacaggcaagcgccaccacgcccggctaatttttgtatttttagtagagatggggtttcaccatattggtcaggctggtctcaaactcctgacctcatgattcacccgcctcggcctcccaaagttctagaattacaggtgtgagccactgtgcctggccaggactcttaaatttttaaaatgaccgttttctttttttggacacaactacagcaagaaataatacagatcttcaagttggcaactcattcaatatctcctacagaaggtcaggaacctagaaactgtgttccttcagggtgcaaacccatgtgttccttaacagcagaaaaaggtcagtgggcaagaccagaacaaattagatatgatttgttttttaagttgaggcttagccagaagggtttgtatggacctcttagattaaggtttgtttcacagtggggataatgtttgctatgtcaataaacaggtacttttctttcatcattctccaaatttggttcttaatgagatctgacatcccctcttccattagaaggtattgaaatccagtggaccagtttctccaagatgtctcttgaaagtaaaactctgcttaaaatctgttttttccagggctctaatcactactctgttaaattcctcaaacttgtaatgccccaaggcttgattttttccagataatggctctatcgttgcacataccctgattctgtcagcatgtgtcattggcaaaatagctttctctgccaaagctttctgacctttggctccatcttagctttgttagcaggaaaggcctgctacccagagtcagagtcaatcagagaattgttcatgtggtccttagaactttactccttacccttttatcttttctttaaactttcgcctctaaatctgccagggaaattgtgacttatagaaaccttgtcaacttgtttgggtcaaaagttagatcctgttttagaaactctgcaaagagtgagattcatggcatcattgttcgccaacttctttgttcctttcatccagaagaaaggtcagctcattacgtaagaaacttttcatcaggaaaagcaaacaaccgataaaaaacagaaactaagtattctgcaaggaaacctggtttaaggagaatgtattgaaactggatatgtctgttcctttttactcctccctttggcatttcctttttttttctgtaagataatcatagaaatttagttaatggaggaactacaaagatcacatggctttatggtttgcctattatgctggccaatcccggtggcacgagggcagcagggatgcagacagatgaagaggtcccatagccaagagtgtaggtcctggagccagactgcccacattcacttcaagcaattggtactcctgtattagaagaaaacaaagtcccttctcatctcctcacccagtatactcctctttttactcagcttgataggaatctttccagtcctctctgcatttatatgtatacatcattcgtattcgtgaccctaataatgatacccagtcagctcacaccagcaagaaaaagtatttttcaagccctctggaagcattggaagctccaagtgagcataagtgaaaataccctaagagatacttccaggttctagatccaggtgtttcattttccccttgttttcccactacattgtcatctctccaaccttatctttagttttgtttttttcatggaagaccagaaagcccctttccccaaagtgttaaaatctggggtgaaggcaactgacctcattgcatactttggcaattcaaagttataaaatgttagccgggcacggtggttcacgcctgtaatcccaacactttgggaggccaaggcgggcggatcacttgaggtcaggagtccgacaccagccggaccaacatggtgaaaccccatctctactaaaaatacgaaaattaatcaggtgagatggcgcacacctataatcccagctacttgggaggctgaggcatgagaatcgcttgaacccaggaggcagaggttgcagtgagtgagcagagatcgtgccactgccctccagcctgggtgacagagcaagactgtctcaaaaaaaaaaaaaaaaaaagaagaagaagatataaaatgttggggcatctttatttggggtgttaaagtagatactgtctctcctttgtgcccacagtggctgagctggggtggggacatttggaaatttgggaggaggggagtattttgggtcatcaccataatggggtcattgctataggcacttggtatgcaggagccaataataataaatgtcccacagtgcttaaggcagtctgtcaaacagagaatgtgtcggatcctcaatgcttttagcactctttggagaaagctcataacctacaaagcacccagagagagtgagaattgatttgagtggacaatgggggattgattcatggccagctatggggtctggtgcagacagggtggcaacaggagtaggaccagtgtggcctgtgaaggcaggggccaagatgcagaggcagacaaggctcttggttatgtttgtgctggaatgcattcacgattagaaacaggagcacaggggctttctgaagggatgggcccagagatcagcagggacaagaagaggtgtcattcaaaattagatggaactatgcaaaaagaacatcagctcttttctccagttatgtaattgcttgacaaatatgttttcagttgaattggttgttagagggcataaatttagactttctgatgccaactagctaacaatatgcttatagaaagatttaagtcctagctaagtattctccttatggaaaaaaagaatgtagttatgtaaaagacaaatgagttgagcctccaacttacagattgttgaatgttcctattgtccaggcgggttggggctgttggtcgatggtgccaagcctgaacaagcccaccactgtgctgggatggagagggaatctcatccacccaccatgaacgtgctggagaaaacagcctggagcgctgcattgtcctcctcaggagtcaaagagtcacaggaggaatctttctgttgattcatagatagcaaaaaggaagggtaaagtttccatttggggcctctggctcttggaaaagggcagtgtctctaaacccaggcaaacggtaaatgtggggcataggcaagagggtccgggtagtggccacttccccatcatgctcgtttctcattttgtgttttttagtagaaaaacacagtgtgttcttttgcccagacattaatctttagaatgcctgtattttctaatgttgggatttctttcacaaccacccaccttaatatttccattgtgactcagaaaatcagacttcattcgattctttagagaactataaatactgttgtcagtagagtgaagtcttgtcttatgtaatcctaattacagaatgtgttctcagaagaggtaggctagaccagagctgggcagaccacaggcagaggccaaatccagccccctgccgatagtagctaatataagttttacacccacttgttcatgtattttccctggctacttgtgggcagcaatgccagagtcaagtcatcataacagagacagaatggcctgaaagctggatttactatttcaacttttacattaaaacttgatgacccctgtgctagacaggcagctcatttctgcaggtaaaattatattcatctcccaactttcattccaaaattgaacctatattactgaggccaaaaagggaaaaggataaaagagaatgtcagaaaaaagaaaatcccatgtaagaaataaaaattatttaaattgcccttgcttttagtaaatagaaatgcctaagtaaagtatcagtaaaattcttggcattgcagcagatcctggagtcccacgttgctttgaggcaaggtccacggcagaagaaaaccccattacctgaatcttagggtgtagcagtttctctgtcccaaggcaaatttaagtttccaacaaaaaggaggataatcagcccagtactgagtgaccaatggtatagagtggggagtggacacagagagaacagctgatactgttctgccacttgcaggctatttggggacatggggtacataaaatgaagtaacaagatagcagaaagtaagtggcacaaacttttcagttgtcagaagagggcaagatcagtaggaaatggagtcattagggaagggtttgcagaaaagattagctctagtggccatctacagagaacgtgctgagtgccaagcacttttaggcatattatataagtattcttaattttatccttgcaacaaagaacctatgggggtaagtatcatctccatttcacacttgactaatctcagactcagagaggttaagggacttgcccaaagtgaggaaagaactgggatctgaagccaggcctatgtggccctgtgtcccagctgtttccacaagcctgggggctcctcattgacagctggtatttagagaggaaattatcatccaagctaaaggacaacacagacaacatgaagcagcatggctctgggaggtgccctcgggaaacagtctcagctggagagtcatggagagatttggtttcaccagattgtgtgaagccttcggtgctgggccattaagggtagactttgttcagtgggcacaggaaggtctggaggaggagagggaaggatgtaaaggaagcaggcaagttaggtctatgtgataaatgggtacatagactatttcccattgtggcattgacttgctagtgttttcctctggaccttagtatctttaaaatcggtacaatagctttcatttacctacttcttaacaattatgtttgaaatgataagaaaacttagtaaaaatagaggaagcctactggccacagaacagagagtgtgtttacagatgaaagtcaaattattatggcttgttaaaatgagtatctcatttaaaaaatactattcttcatcttcatgatttgttcatcttaaagattaggcaacaacttttgctatgtatgctctcctttccaagagaaagtttctgattctctgccaagtaatcccatttcttaaaataagactgctttatctaggtcatttggattctgattcctttctcttaagagagaaggagcccactggacctcatcagctgcagcctgaatagtcagttcacagtttttcagatcctggtgggtgtgtgagatgatgggagaatctcctccatacattagtgtccatgaagttttactaacttgtcaagtgtgaactgacctttctgcttcagccacgtgagtgtgggagtttcactgaaaatattcttgaagtggagggggtctttttacaaggttgtaaaatgtgggccttctggtgcctgcctcttaggtgactccaagagaagcaattctggaaattcaatagccagggaaggaagcacatgaccaggggcttcagcttgaaatcaaaacctggtacatttgagactagttatttggtgccctcccggagagtcaggcccaactttttcaataatgacactgcaatccggtcatctgtgagatttgatggtttacttttcaggtgggagaaaggaatgttggtcagtttggctgaactggttgttgacttctggagagagccgaagctctgctagctcattggaactcttacccaggctaatttccctcggccagataaagagggaagccttatctgccttttaagtctttcagggttgggctgttttccccttaaagatgcctatgacagaatgggagcaagacatgtctttggcaacgaaataaatgaaaaatgatcacagaaattaaaaataaatcaacgtatgcatgcatcccttgccccaagcatgaatccagcaaaaacctaatgtttaggactgaacaaaggtatacctttgcatcatctatgggaaagaaataattgtctaagcaaactataagcatatgcaactctgcctcagttgtgtcaagtctaagggagatgggtgagtaggccccagagggctgcctcaccctgaccactggctggtagacaaggtaagttttattacaaatggcatcacttcttcctctgttacgtaagtcctgagatttgtgcatcagcctacattgctgaacttccgaagtcgtgattctgctccagctccaccttttgaagggtatctctttctccatctctcacacagacacacagatacacacacacgcacatgctctctttttttctctaatatacagaaggcgggcagaaacagctgggaaagtaacagtcagtgctccacaaaacggggtcgcgtgactgtgaacatcagtatctcctgggaacgtgatagaaataaaaatagttctgggccccacccagacctactgaatcagaatctggggatgggaggagagtagagaagcaatctgttttttatgaaccttccaggtgattctgatacctacccaagtttgagaggtgaggacccaggtgactcgggggtaacttttagctttctggaagatgactaaattttaccaaatgataatggaaatgtattcctaaaatctaaacaacataaactcttaaggtactaagttatttaagttatttgtaagttatctaagttcttcctaatctcagaaatcgattaatgtagtggttttcccaagcctttctcattatttctcttgggtgtcactggcattgacttccactaaaaaaagatcccatggtcaaatgactttggcatacatacaactggataaaaacaatataaaacagtttttcctgcagaactcttctgagtctgtaatatgctgacacttgtttttaatcttcaagataaggatacagaacttttcatcatgggatagttttttcaaggaacacatcatagaacgtatggtctacggatcaccattaaagttatccatggtttgcctaaacagcttcctgattcattacgagaatattccccaaacaagaaaaatgaaacatactttaagtacctggaaaggatctgttttttgaaaagcatacacccaagttttacttttgaaatcctaaggtcttggttttgaaaaccccaggcgctaaggaaattacatgttttaaaatcctaaaggttgaggaattaatattctaaacttcaaatttttgaataatcatgacgttattggcaaatacatataaataaacatataaccggaacacgtttttcccctttatccaatggaaatacgatcaagcatcactcttagcagaagactaccagacacttgtagggacacgaaaagtgataataaaaacaatttatttattgaatgcttgctatagaccagatgctcttctaagcactttgtaattattttatcttgaaagcagtcctgtatttataatcattacctcttcttacagatgtggaagacgtgactcagtttcctgattacccagggtcacataacatgtgtggagaaggcaggatttaccacctcagtccgcagttcatgctcttaaccataatgctgtactcctcaaacctgccactcgagagcttggaatgtagggggagaacaaagacaataaaaagataaactagcaatacaaggcaggatgtggtgagggccaaatgaatgggccacaaacacacacctctgggttgaaaggatggtgatgttatagcagatctcaggaccctcagtataactggttctgggagatgttccattagaaagtttttcagaggaaggccgggcgcggtggctcacgcctgtaatcccagcacttcgggaggccaaggtgggcggatcacaaggtgaagagatggagaccatgctggccaacatggtgaaaccccgtctctactaaaaatacaaaaattagctgggcatggtggtgcatgcctgtagtcccagctatttaggaggcagaggcagaatagcttgaacccgggaagtggaggttgcagtgagccgagatcatgccactgcactccagcctgggagacagagtgagactcttccaaaaaaaaaaaaagtttttcagaggcaaatcacagctattgacccaagagtggctcacacctgtaatctcagcactttgggaggccaaggcaggcagatcacctgaggtcgggagttccagaccagcctgaccaacatggagaaacaccgtctcttaaaaaaaaaaaaaaaaaaaaaaaaaaaaaaaaaaaagccgggtgtggtggcgcatgcctgtaatcccagctactcgggaggctgaggcaggggaattgcttgaacccagccaggaggcagaggttgcagtgagccgagatcgcgccattgtactccagcctgagcaacaagagcaaaacctccgtctcaaaaaaaaaaaaaaatccgagaaagcatgaatctgttgtgctttgccacagttgacattgcacttcaggaggattattttcttttatgaaggtatgtaagtgtccttgcatgcctagactaaaatgaggttagggcttcatttggcaaagacgtttggattctgattgcaagttaaccctgagtccgatgctgaaaaacgaaaaatggtttaagatgtgcccctgcccttggagtccacaatccagttagggaaataagatagtatattctttatttattcctgtctttcctcagaatgggtggaagcccagcgataagatgttagcataaggcctttcgtaattcaaaccctgtataaatactttcaaatgtcagatgttgatataaaaatgatttggtcacctgaaatttgggaatctaagccagggttcaagggcacagccactgtgctaagtaatctcagccacagctactggccaagaacacattttgtcctgtacggcacgtgattttcctgtgccatttggctttgcatgaggtgccaaccctattgggcctgtgagacgctgagactgaatggctcccaagatccctgcttgtagtactggcagtggtcatcacaatggcagacacccccaagttagattatacttagttgaaagcctttaaactggatacttagaattcctttgggttttgttttgttttgatcatgtttattgcatttcatcaagtatgttttgttgtgagatagagtcaggtacgtaaagagcttctcatttgtgatgtatccgatgccaggtggcacattatcaggatgtaacctggattgtttgtacagacatggtctgtggggaaatcctaagtaagggggaggcaaaggcaggacggaggtgaagagtatagactccggagttgcaaagaactgaatcagaattctggcgtggccttttccttgcagtgagacttggggcatgttacataatctctctgatctctgagttcccacatctgtgaaatagtgattattataacacgtatcccatagggttattgtgagagttaaatgggatcattcatataaaacatttctgtttaaagtattattactgctaagaaggggttagcaaccactgaagtcacgcatgtgctagaggaagctgctacagtctctacctgagccattggtcaattgttgtcgatggttgacaccttcccattttcacagtgaagtgagtattctaaatgccacatcttgtcactgaggttcatgattaagtagatcagctagcattgcttattcccttctagcctgtgactgtgaccccaggggcattgagacgccacagtgtgaccagtccacgggccagtgtgtctgcgttgagggtgttgagggtccacgctgtgacaagtgcacgcgagggtactcgggggtcttccctgactgcacaccctgccaccagtgctttgctctctgggatgtgatcattgccgagctgaccaacaggacacacagattcctggagaaagccaaggccttgaagatcagtggtgtgatcgggccttaccgtgagactgtggactcggtggagaggaaagtcagcgagataaaagacatcctggcgcagagccccgcagcagagccactgaaaaacattgggaatctctttgaggaagcagagtaagtagttaatgagccagaggaattactcataaagctgaaaaaatattgtgagttaacagcaaagatttcctggcatggtgcttccatcaggaggttttgttagtcctgtgggtgagaacagattctgagccatttattttccagcagtcttgactgggcatttgggtgagtgaacgttggcacatcagtggggaccagccttctggaggctgcagtacagaatatgcaagcattatattcagtgctcctccttgcaaatcatgttctaagtcagtaaaatgggaggaatgctggatttagaagacaaagatccataattgagtcttggctctgatgctaggcttgtgaacttggatgactcaattcctgagcctgtattttctctcctgtggagaaggggtaggataatatatgccattaccttatgaagtaatgaaaggatttatatataaaataacaacaggattgcagaaaattataaattaagtattgctactatgggggaaattccattacctcaaaataagactgcttacttcaagttttttctgcttctccgccattagtccaccagaccagtgcttcattcatctagttataacagctgctctatgctgaaaagtcctcatcccaccccttctctaggtaatcttccctctgattggacagtgtttgttagtggaagcctagagaattgaccttctcaaggatcatttatctaccctttctcctacctcccctctcttgcccctaaacttcccaactccttttgccaaaaaggaacccccaaaacagcacaataagacctaagtgctaaaggacaaaaatagaaaagggtatgaggcatctgtgcttccctagatgctatggttttttcactgcagactcaccatctaggcctgaggggactgcttcacagttaaatcctgcacactgaggtgtttatatgacgaaatgacagtaacattttttgtgtgtgatgagactttaatcagcacctttaagaagccagagggacttttcatctcataccaggcatgagtagcagaggacagctgacattagctcaagcgacttgaaggaggtccttcctagacctagatttaaagtaactggaccttgatgtcaagccttgggttttatgcccaagaccatgtagctggccagagtgttaggaaacgtctgatgtagagtgacaatgcatttagtgaggcattttacctcactgaaaagactaagcctcctaatgtgcagagatcacagttttggcaggccgtggtccgaatgcaagcccatttaggaaatgatccttggcctgggtcttaggcatctctgggaggaagaaaaaaatctggtgtcctttgagagcctgccagaagagagattacattcccaaaacagctctgtttctaccgtcactattcatttaactagacagattgtaataatcacaggaaaactagttccattactcttttttttcaacatactatccaaggatacatgttttaggaaccaaagtggccttattttaaaatacgatgttagatttgcttgttttaaaaaaaattgtatcattttatgagacctgagaagaaatgaaagccttctgtgagtcatataattaataaaagcaaagcactgaaaaaagaaactatgtatattagcctcaggaaaaaaaggcactgaaatgtaatttaatctaccattttaaaccatccctttaagtactttttctttgagttgggttatagttttatctcagccttacatatcatttttctaatggctcccaacctttcagcatctttacattttcctggttttttatactattatatcgccaagaagacaattacattcaattaggtgaaccagtaatacccagaggtaaaatctgctcaaatattactttctttacaatacacatacaaccctacccacacccacctggagcacactcgcatgtgcacacacacacccatatccacactatgtacacaataatatacaaatagatgtcaaaagtacggctttgtaggtttgaaagtacagaacaaaatgcagtttagattccaaattaaatactgtgaaagctaaatcttcttatttcattcttagtagatgctattttcttataaaaaataaaaaggctgttggtagaaggaggcccctctgacggaagagaggagtgtatgaaagctgatactggtggctcctgttgtctttgtggcaggctatagggcttcccctctgcatgttccatcttgaaggagatccctgaggcttagggaagaatgttttgggcttgtggctgggaggcctaattgtataactggagtcatttatgtcttcagttttcacaattgtaagggcttgaagctgcctgtgaatagagccagaactccacactctgacctgtgctcatcttacagcagaaatttggaatcccttaaatggcttgtctgccacaactcagctgagtggtacttctgtgtttctctcaaaagtcattgaacaaagaaaaattgttagatttaatactatctgttataaggaaaataaaactagcacttagggatgaaatgttacaaattactgaattggtttgaaattagtaatggatacagtactagtagaaaatatgaaacgtgaaagttctcccttgggtttattttatgtaagtaagcttaactttctctttacaggaaactgattaaagatgttacagaaatgatggctcaagtagaagtgaaattatctgacacaacttcccaaagcaacagcacagccaaagaactggattctctacagacagaagccgaaagcctagacaacactgtgaaagaacttgctgaacaactggaatttatcaaaaactcagatattcggggtgagcattttttggtgcaaatagtcccagacaatggatttaacgatatgtctaacgttttaatatagcacttttggggaaaaaaaaaagttttctaataaattttaaaacttttgctcatccagtttctggcacaaatgaggatcaaagtccccattttacaaatgtgggacttgggcacagagaacctaagagacatagcaaaggtcccacagagtgaatggcagtagttgtatcagaatggtatccatttcctgattttttttttttccctccagttagtagtttaatcccctggccttttcttggaagggggttcttttgaatagttaaggtattaatacttctgcaaatcctttcacattcaagaatgctgcttggtcagaaaaaaacttttgcaaatcattatttatatcatagactgtaaaggatcctcagcaaaaagtgaatgtagaaatatgttacatcatactgtccaactatccatactgttttatgcatgattgcttttggactaaagctaaaaacatgtcatgctgttatatataataccgtcatcccttggtatccatgggggattggttccaggacccactgcagaaaccaaaatccacaggtggtcaagtccgttatataaaatggcacttgcatataacctatgcatatcctcctatatacttctttctttttctctctctctctttctttctttctttaagagatgggctcttgctatgctgctcaggctggtcttgaactcctggactcaagtgatcctcccgtctcagacttctgaatagctgagattatagaggtgaaccaccacacccagctttacttttttctttttttcccttcagtatatttaaaagtaatctgtagattacttacaatacctaatacaatgtaaatgctatgtaaatagttgttatactttattgtttaggaaataatggcaagaaaaaagtctgtacacattcagtacagatacaaccattttttccaaatgctttccatccacagttggttgaatccacatatgtggaacctacaaatatggagggctactatattagtcatttgagtggatccgaataaaggattgagaaaagtcatctagtcatataatcttcaggctgcctgaaaccagctatttataaagaactggatgtttgcttgtgtatagaaacaagattgcatgattttcttaatttttcatttttcacccagatgtttgccatactcgagctggagtaggtgctaatgggacaaaacatattcattgctcatgaaaactgtacttcataaatattttttcttgaattttaaaactttacagtaaatttaggacccgaagacaccaaatatagacactgcttggggaggaagcctagtatgatgaggttaactgtgggcaatttcatttcctaccctaggtgccttggatagcattaccaagtatttccagatgtctcttgaggcagaggagagggtgaatgcctccaccacagaacccaacagcactgtggagcagtcagccctcatgagagacagagtagaagacgtgatgatggagcgagaatcccagttcaaggaaaaacaagaggagcaggctcgcctccttgatgaactggcaggcaagctacaaagcctagacctttcagccgctgccgaaatggtaaggtttggggatgtggccttactgctatggtgccaagcaaaaaaaaaaaaaaaaaaaaaaaaaacaaagaaaaacaaaccatcttttgtcattattacaataatttgcaaatgaatcagcaggactgaaactcctaggctgaggtctctggatcctggaatggggtatctgtaaccaagacagattaaaagcagcagcatatgggtttccagccttcccctcttctgtttctctgtggtcctcaactaaagaatgaatcatgactattctcccatactgttttagctactcagtgacaccgcactgaaacttgatcctttttacactgtggacatttctttaatattttttttcctaagtagagacagggtctcactacattgctcaggctagtcttgaactccgggtctccagcaatcctcctctcacctcagcctcctcccaaagtgctgggattacaggctaacaccccagcccacccccacccccgcttttttttttttttttttaaagagatggagtctcactacgttgcccaggctgacctcaaactcctaggctgaagcgatcttcccacctcaccctcctgagtagctgagatgacaggcatgtgccaccacacccagcttggacattccttttttagtttgttctgatttgaattataaaacccatctcagtgtaggaattcagagtcattctagaaggggcttccattaaaaattaaagggagcaaaagaattttttcacgggtattagctattatgttcctttgttccagtaactttacctggtgaagattaaccctgaaaccagcctagaaagtagattcatttcccagaagcttttaaaaaggaactctggagccaaatgaaattgggttgtgagtttaatgaaaatcaggcagaaggccccaaaaaagcctaactgagcctgtttcttcctcttccttcctgtgttttcaaggaaggatacctatgtgaaataatttggagggtattttttatagactaaggtttgtgttctcttagcccagagacacagagaaagttaaagatggaaggtacataggcgcagaagagttcaaacttcattacagctttgtcttagtgatgcttcctccctcctctcatcactttctctgaaatagacaaaattggtcacaatataagacagtgtttattgatgcctgctaggtttcatactcattatcttctgaaactttatagcaaatagggagcaaataatctgtcatttattaaatggaaaaataaaagatgaagaaaaaagaaaaatgaaggcttagagcaatgtgtaaattgcagctaacaggagacaaagttatgaagcatgaaatgccaattctctccatctttcccttcagcattgattccttccttacatattgtagttaaaaaaaaaaaatcagttatcacaaacaagttctgtgtgacctacaagaaacagctaagcatgctaaaggatttttgtcttgaaccggaggcatctccgtgggcggcagggagatgcatgggcggtgggtggggttcggggttcctctggcctttcaaatgtgtgcccttccctgtgcttgcttttccacctggtaaactacctagggattagcagctgcttcagttctcttactgtgtttttgtctttgttaatgatcctgtgagaattctttctgtaagttctttactgccatttccttgtgtagagagagttttgtccttttgtttttcaggtacttctagttctgtatctttgtggatgtttagctagagccatactgtgtttttttttttccatgtctgccccatctgttgaaacaaaacagatcttctatgtgtgctgtcagattgtttttagaaagcaaccgaggttttacacttatgttcttaagactcatgttttacagcatgcagaatacactttattttctgaagctttttgtttttgtaagccagataaatgacttatttagttgtaatttgagatataatggaattataattatcttaaaattattaggctaaatagttgattgtatttatttaaaaactacttttttgtactttttaataacaatacttgtttgggaatattctgttaactccttttcactgcagtaaatctttgtcttcttttcagtatgagaatttccacaaacagctctaaatgcaattttctccctgctcagccttttctatcatatagcacacttgtattataatttatcaatttgcatttgtatgccatgaccaagtggtgatctttgagaggttttggtaggtaagaaaggaggactctatgcatgtgtgatggcagtcgggggtggtaatttgggaacacttcatctacctttgttcctttgtttgtactgttttctttaacctgtggaatgttttcccacttcccctgctcaaatcccaccagccaacagcttcttcagctacaactgtagcattcctctgcagtctctcctttgtctactttctttcatagtgactgcatctgacctattcttggctattttatgtggaatgatccagtcctaactagatgggaagttactaaaacgctaggtaatagatcttttatgtcaccatatttactggaggagttaacatggtgctggtgctggtcccaaagatggttcacaataggttttttttttaaactctaactggttagaaaaaaaggaaggcattccttggcccttgcactggcagaattcaacttgatatagcagatgtttgcatcctgggcagagctcatatagtattttaactcatttgggcagaagatattgatgagttgtaaacttccattgtttccttggaaataagcaggttagtttactcctaaactctctgctcctctctccattctgtctcccaaacactgttttcaagcacccttgctgaggaccacctacacattctctggggccacccaggccctgcacagctgttttgctgcagcagattcactatccgaagtattgtgcctgatccttggcttgttgcagacctgtggaacacccccaggggcctcctgttccgagactgaatgtggcgggccaaactgcagaactgacgaaggagagaggaagtgtggggggcctggctgtggtggtctggttactgttgcacacaacgcctggcagaaagccatggacttggaccaagatgtcctgagtgccctggctgaagtggaacagctctccaagatggtaactcagtggatggcctcagtttttgttatgtatgtttgctttcagctgtggactaaaggatctgaaagggagaaatcaattctaaatgctaactgaaatgaaaagggcatatcacaatcaaatatgaaagttcatgtttctgtgaggtcagagaaagagatggggagattttcttcacagataaagaatttgctttctcctcactcaacacatgctttagagcaagatgtttaaatcttatactggataatttgagatagccatcttacttttctgactccagggttataaatacatccagctgtatgacaaaaactctatactaagcaattgagcatttattcttctaaagtgacacacactttttaagtatttatgtgggcacctgagaaaaagactcaggactattttataggccaggagttaaaaaacaacttgaaaaattttaaatgctagttctatttatatcagaatactgtttaggaatctctatactgaatacttgcagtctgtaagatacaatactttgttgaatgggagaaagttgtttcccagacatatgattccaagtacatagtttttcaacatcatttttgagccatttccaatattctggtctcctttagaaagaatgaaagtcttccctgggtaatttattcttcatatttaggtctctgaagcaaaactgagggcagatgaggcaaaacaaagtgctgaagacattctgttgaagacaaatgctaccaaagaaaaaatggacaagagcaatgaggagctgagaaatctaatcaagcaaatcagaaactttttgacccgtaagaaattttttcattttacttttagacatttgtttctgtgtgattctctgtttacattttagataaaatccatttctgtcagggtactaagtgacatttccaaataagaaaaacgtccgtatattaaatgtttccacttcttaaacttatatatgtgtatcaaataactttctccaatgttacgcagatacagacacacctgatgggatactcaggtagccaatcaaaagtcaaatatttacattgaaaattgaacgtggaatttgttagaaattacgtatagtaatttctaaccttaaagaagtggagtttgttattttggcattgcccccaaagctttgtaattctattatttacaggatattatacctatagttagttaagagtgttgctagtcacagttcaagtgttaccagtaaagatggttttggctgcaaattacagaaaactctcaagtgaaagggacttaatcaaaaaggatgtttattatctcacatcttaataagatatccagtagcaggatagcttcctgggtctgcgacccacatacttttcatctttctactctaccatcttaagcatatcagctttgtcctctagctcctcatggttacaaggtagctgccaaagttccagacatcatataaagattaataatggaagaagagaccacctattccttgcatctttttaaaaaggaggaagtcttccctagaagcctttaagcagtcatccttataaacctcactggccagcaataagtcacatgccaatgcataaatgtcactggaaaatggaaatgcgattacagtaattcacaaactaatatttaatgctgggttgataattttacctgacttagaggcaggtacctgaaaaaaaatcagtattctgttagcaagaaaaaaggcatggctaataaggagtcaacagtatttgctaaggatatcttaggtaatattttatggaagccatcattcaagtacatattttatttgaataaatcctctggggtccatttttatgttcaatagtttaaaacataagcaaagcttgaaagtaaatgaggatctgacgtatttgaagcttaacttcataaactttttttttcaccatcttccacattttacatttgaaactccttggctttgttgacaacccattattccggttctcctgcttctataattttctccctttctataatttcctgaatctagatcatttgtaggaaatatcaaatctccatatctgcattcacaagtttctgagctattcgtccaacctcaattaaaagatttcattgcctttaagtctcagctttaagctctggccctctatggttttccacaatgttcagattcactctgctatactttcccgtaacatactctgccgttcctgtctccccatctggaattgtcctttcttctttcaaattctattatcccttaaaatctgatcagctcctcatcttccacgaaggtttccctcactacccagcctaaaacaaattctagtagtactcaattgtctgcagttacttttttgtgtgtgtaggtctcatctcccctcaaaatcccagatagattataaactcttaaacaggaagttagtgtctcttggtgtgtaaccccaccatgctagtccatagtagatgaccagtaagtggttgaatgaatgaaccatctattcttttcacctctttttggggacatctttgcttttcacagaggatagtgctgatttggacagcattgaagcagttgctaatgaagtattgaaaatggagatgcctagcaccccacagcagttacagaacttgacagaagatatacgtgaacgagttgaaagcctttctcaagtagaggttattcttcagcatagtgctgctgacattgccagagctgagatgttgttagaagaagctaaaagagcaaggtatctaaagacatggcatctaaggggcttattttgtgtatctatcatggagtaaaaagtatctctttaaccaatgaaacttctaagaaggacctatgcgagtctctctgggtcatttcaggaaggctattctttaaagaaaagaacactgagagtacttttttcatgttcagcaacaatatactgtctcattattttttactcagcaaaagtgcaacagatgttaaagtcactgcagatatggtaaaggaagctctggaagaagcagaaaaggcccaggtcgcagcagagaaggcaattaaacaagcagatgaagacattcaaggaacccagaacctgttaacttcggtaggcatacacaatcattacatgaatgggaacacacctacatatacacttaccagaaaagtacatttgttatctatgaacagaaattcttacaactcaacattaaaggattcctttaataaatctaaactactccgttagcatggatgctaaaaataagtggagataggttttcaaggaataaaaggactctgattcagacactggaccattacgtcccatctcattttctcccccacaaagtctgagaaagataaaaacttctattcttgggcgggcatggtggctcacgcctgtaattccagcattttgggaggccgaggtgggtgggtcatttgaggtcagtagttcaagaccagcgtggccaacatggcaaaaccccttctctactaaagatacaaaagttagctgggcatagtggtgtgtgcctgtagtcccagctacctgggaggctaaggcaggagaattgcttgaaccggggaggtcgaggttgcaatgagctgagatcacaccactgtactccagtctgggcaacagagactccatctcaaaaaaaaaaaaagcactcctattcattgaggaaacagcatatactctgttcagtagtatgaagtataataattttagaaaactgtcctgatgttataaagcagcttatctggttaagaaggccaatgtctcaagattttggtcatcaaacattttactatatagtagttttggaaactatgggagaacagtcagtctgctttcaatacccaattctagagaaacctaatagagcacttatagctaaacaatctgttctgtttagaatgcatggaaaacttaatgttttttataagaaatatactgtgactaccagatattaaaagtactcattacgaatttttcatagggatctagcaccttgctctaaaaatcctctttatctcttaaaagaagtaatgcaaacataattccattaaattcttttgtttctcagaaagttaatgttttcgttccaattttacgagtttttaaaaaatgaagaaaattgatgagttatctaatccctatacaggttctcagaatatactttgaaattaaatgctcccatacccagcattgtcagccttctcaggccaatcctccatgtgtttaaaacctgggaagatgaattttcaacatgcttttcttaccattagttggtaaaaacctgtgttcccctattctattgctgtcagttaaatgaaggccaataattctgtccattttcctccttaaatttcgagtatcaataagactttttcttcaggctatttgttcaagtttagaaaaattatgttttcccaccagactataaatattttgatgtttcgatctctaggtttttccattttctcagtttgctgttaatattttagtgaatattatgtcagtgactgtagaaattattgttttgaaagccaggtgcagcagtgtgtgcctgtagtcccagccacttgggaggtggaggtgagaggatcacttaaggccaagagtttgagactatagtgcactatgatcatgcctgtaaacaaacagtcactgcactccagcctgggaaatatagcaagaccctgtttcttgaaaaaaattgttctgaaaagcaaattagaaaatactgaattataggtgagatgtggcttgatgatgcaagttaataattggggttctgtttttcaggggccctagggggcaggaagtgttttaggttagtaacaataagaaacaaagagaacctctaactaaactgtgttcatgaaagcttatcagaaacaattcactcaaactttatcttctaagaattataatttctaagaattttattctaattaaagggtccttaggtttgaaatatttacaaattttagcctatgtcttatactgacccttattaacttcattatagcagtactgttattcagttaattctatgtaattagacccatccttgaagatcattttaaagaaaaattgagtgctcagtgaaattgattcttttgtcatgggctcaactgcttactttggctagcttttaaaagtcaatgtttattgattctactttgaaaggagatcagatgtggatcctcaccagttgcccagatatttttttttccctaaataactttgtgtatttagagtttacagctgtaacgttcccagaccatacatcatctcacaattctatagaaattcaaagaacatccctagtctccatgtcttcagtaattagctgaaatctccactactagagtttaacatttattttcccactcacattaagttggaaatttatgtggaaatccctcttcgcacagctgcttatttgtgaatgttctttagccaaagtttgcaggtgtccttaaaatgctttctcaacacatcatgctccttggggaggtggggttttttgtttttttttactgtcagaaaaaattttacatcaatctcagcttagatcatcagaagtactgaaagaatgaagtgaatatatgaaatgtagcaaagactaaagttagatacttcatgtaacttttcctgaaatattctttttagtaattacttcttttggtctagagcaaaatggcacagcagacttttaaatcttcctccaaacttgtactcatagtaattccatttcttaaactaatgtcttgctggaaaattgacatgcttttagattgagtctgaaacagcagcttctgaggaaaccttgttcaacgcgtcccagcgcatcagcgagttagagaggaatgtggaagaacttaagcggaaagctgcccaaaactccggggaggcagaatatattgaaaaagtagtatatactgtgaagcaaagtgcagaagatgttaagaaggtacgtaaatctttgtaatttcagagctatgttgttaaaggagccaccagtctcctccttgcctgccttagagtaagggacatggacctaacagaaacagaattcatcagaaatatcaaatgacctgttttgcaacagccgtctttagaagtgtggatgggaaagaatatggaaatatctaataagtatgacctatgtcctcaaatccaaatttggacaagagtttagaagaacggaattaacttaggggtagaagtctcaaaacaggctttttttttttttttaaaccaactatattgacaaaaaccagtcatattgaacttttatttctgtgcggtagtcagttaaattcttcatggcatatagtaattatcaggccatttgagaatattttacaagcaggttggaacagagaacaggtagtaggaaaccaaatcttatctctttgagactcattttgaattaactacccctcacctctcattcgaaggcactatattttgcagagaaaaactcacacaacccaaatgtttaatcagaagccatgtaataactgaaacacatgttcagtttctcaataatgcttatttctaaagagaacattaaaaacttggtggcgccggggtggggcttaaaaccattgaatcactggtccccaacttttttggcaccaaggaccagtttcctggaagacaatttttccagactcgggggtggggatggtttcaggatgaaactgttccagctcagatcaggcattagattccataaggagtgcacaacctagatcccttgcatgcacagttcccaataggattcgtgctcctatgagaatctaatgtcaccactgatctgacagaaggtggagctcaggcaataatacttgcctgcccacccagttcctaactggtccgtaggcctgggggcacctgcatttactgacctaatttcagtatttaactccctactattcaaaaattttctggaagttactgtagcttttcgggcattacgtaagagtaactttccctacctctctctaggttgggaaagagaacaaaacaatgagaaaagttcactgccacaatatcagacagctgtcttttctgttttggtttgtgtggtttcctgcagtactgaggacacaaatttctcaagtactctgcttcagggcattttgcataatgacattttatcacaagagaaaggaacaaaatctcttgaaatgaaatttccataaatggctatttgaacagtttctaaaaagaatcatttgcattccaaccccacaccccatttctcttctcctcactcacttcttgcatatgctacaatctcacctttccttcctgtatcttttgtttaatctttttcctctgatttccttataagcaagtcttcacaaatcctaatttagtcaagatccaaagagcctccacttcttcaatatgggcttctctaatgtctaatctacttttgaaaaatctgcgcttctctatgtaatttgcaatacaattatgctacaacttttctatagaaaagtaataatcaggagaatgaggacttagccctaaggatttgctgcaactccagaattttttgaaatgttctttaaaatcatgtcaattttgcattcaattccactgtttgaagataaaattttaaattacttaccagtgaatatccttggtggcccttaatccagaatgcatgccatgattacactattgctcttaaatgtaattactgacactaacattaccacttctttctgtctaaatgtggaactatagactttagatggtgaacttgatgaaaagtataaaaaagtagaaaatttaattgccaaaaaaactgaagagtcagctgatgccagaaggaaagccgaaatgctacaaaatgaagcaaaaactcttttagctcaagcaaatagcaagctgcaactgctcaaaggtgggtcttttcacacaggcttattttttaaattactttaaggcatccatagtttatttaaaagtgaaaaatatattcactttgtcttgagatcatcatagtataaattgctcagactttatatatatatatctccccacagatttagaaagaaaatatgaagacaatcaaagatacttagaagataaagctcaagaattagcaagactggaaggagaagtccgttcactcctaaaggatataagccagaaagttgctgtgtatagcacatgcttgtaacagaggagaataaaaaatggctgaggtgaacaaggtaaaacaactacattttaaaaactgacttaatgctcttcaaaataaaacatcacctatttaatgtttttaatcacattttgtatggagttaaataaagtacagtgcttttgtatatattttggtgtacttgttactttcactgattgttgatgaatcccttttttcactgtaaacgtggatttataaacaa

SEQ ID NO: 1538 - DNA, 136 bp, Homo sapiens
tttaataaatggtgttgggaaaactggctagccatatgcagaaagctgaaactggatcccttccttacaccttatacaaacattaactcaagatggattgaagacttaaacgtaagacctaaaaccataaaaaccc

SEQ ID NO: 1539 - DNA, 5252 bp, Homo sapiens
gtggctcatgcctgtaatcccagcactttgggaggctgaggtgggcggatcacaaggtcaggagattgagaccatcctggccaacatggtgaaaccccatctctactaaaatacaaagttagccaggcgtggtgatgtgcgcctgtagtcccagctactcgggaggctgaggcagggggatcacttgaacctgggcggtggaggttgcagtgagccgagattgtgccactgcactccagcctgggcaacagagcgagacttcttctttaaaaaaaaaaaaaaaaaacaaaaaacaacaacaaaaaaaaacttcaacatatcttctggggacagaagtttacccacaacattaagtgatataaaaggcctgaactgaagctgcaaggctttatataaccaattacccttgaaggtctagactgtcacttctgctacattctatttatcaagaaagtctctactttttgttcaaattcaagtgtaagaaaattagattttatatctccatgagaggagggctgaagaattaccactgtttcacacctattttgctccctttttactttttcctattcttttttctttttctctatctctctctctctggtgtactttaattctttaagttaaatgcatttattatgcagctcccctaaaagactgataaaaacatttgaaaaaatcctttttgttttagaatatttctatgatttttaatcaaaagttttcctgagagtttgtggggtatattactgtgtgtatgagacaggcggtgggaggaagggagaaagagagagagagaaagagacagacagacagagagacagaggaaggtaaggtagaatggggaaagaaaagtttgtgtagtaaaagcattaaaatgaatagcctgtgctggatcctcccacagatccccacgattgatgaaatgccttctcaccaaataccaagtacaagcattctttctatttctagaagttgatctgctctttactcagaatagcctagatcaggtagaaattgaatagtttctagagctcccatttaagagatcatggaacagatttattgaaaaggaaaggaacctgtgctgtctccagaagaaatcctgtttggaaacaattgggacactgcatgcatttgccttatgatgtctctgatatgttactgttttgaggttctaaaatattgaatgtataactcttccatttctggcacttggctgccacattaggatttctttctcaaacaggtacctccagagaacatacagttatgcgcattttgaataaaaagctatttgtctttcatgtgacaaatgaatcacttggatcatttttctttgtaattgtaaaaaggtagaattatttttcaaaaatgtttattgtttttcctaccaagatgctctttccctggcccttctctacttcgcttcttcccgaagaagggctatattttctgcccactgatgtcacacttggccacttgacttgcttcaaccatataaactgagtgcaaggggtctgtgtcactcctgagtgcaaactgcaggagccatcatatggttctgttatcactctgccagagactggcatgtcccagcaggaggatctgcatcttgggatgatggagcagagcccatgtcacttcacaatgacaatacaatatgagccagaaaaaaactttgagtgttttaagtccctgaaatattcatattgtctgtggctgtagcataactcaaaatggctgacacattgtctatgaacataaaaacttccctgggaaatggaatatgtgctttctcaaaggggcagagcctgtccatttctgtatggctctgagaagatatctatggatacacagaacttgatattccattcacctggatcttggagtgaggtagttggattcaatgattatattattgagatcttcagtttatttgatttccatttttatctgtgtgacattgagcaaatcaagcaaattaccaaatttcttaagcatccgtcacctcacctagaaaatagaggtggtaatgcattgcctcatgggattattgagagaatttaataatctaaagcagtggtcctcagtggaggcaattttgccaccaggggaaatgtgaaaatgacaggaggcatttctgattgcttcaacggagcagagagtactactgtcatctagagggtagaggcctgggatgctgtaaaacattccacaatccacaggactctccccccacaataaatcactttctggctccaaatattaagagttctgcaactgagaaaccctgagataaagcaaagtgcttacttacctaccccaagtttgggcactcggtgagagaaaaatgtttgtcatatacaatattatttaatgggcttaaataacagcctgatcatattttgcaattatgagtttattcatcaaccccaattttttaagtttaccatcaatatctgtgtttgactacaaatatataattatagaaaaatgatcagtctttgagatagtttggcagtggcattctgtaaatccaacagtggttataccagtagtaaaatagaagatgcttataattctctcaagtttcatagaattttttatgatatacttcaatttctgataattattgtgggcatacaatgtattttagacagggtttataaaaccatatgcatttaaaatattatataaatatgtagtgcataaaaataaactgcctgaataataaatatatttacccaaaaagtaaataaaacagctcataagaagctgttccaattatttaggtaaatactaccttctgtgtttgactttctttcattgctttgagtcatgggaataaaaccaaaatactttcttgcaatgaaattgggaaatgacatcacctaaagcatcccaaaaatctaatataaaagtgtcattatcctaactctctccctttgtcagtgcccaagggcattccagaattgcttcagaagtctgattttcctcacaagaaactctactgtagctgataattaagaacaggaatgaattgtgtggaaagctgttggtctttatagaaagactggcagatacttgggttctagtgttggtaactaaccttctagtgatcttgaaatattcattttctggccagatgcggtgtctcaagcctgtaatccgagcactttgggaggccaaggcagacagatcacttgaggccaggagttctagagcagcctggccaacgtggtaaaactctgtctctactaaaaacacaaaaattagctgggtgtggtgatgtgtgcctgttaatcccagctaatctggaggctgaggcaggaaaatcgcttgaactggggaggcagaggctgcagtgagctgagattgtgccactgcactccagcctggacaacagagcaagactctgtcttaaataaaataaaataaaataaaataaataaaaaataataataaggcctgatgtggtggctcatgcctgtaatcccagcactttgggagcccgaggtgggcagatcacgaggtcaagagatcgggaccatcctggccaacatggtgaaaccccgtctctgctaaaaatacaaaaattagctgggcgtgggggtgggaaaataaacactcattttctaggcatgaatttactcatttctaagatgagtgtatagaattagatcttgtctgtttctttccagcaataaattatatgaattcatgtctccacttgctctattttacatacatatcttttaagcttcataggaacactgtccttgttttgaatggcatttaaatgaaaacaagccttctaaagagagtcttagcattgctttccctctttgagccttgttttgcttttaggttgtagctggctgggatttgtttttgtttttgttttcttttaatttaaaaatctagcagaaggctagtctttatcattgaaaaataaaaaataaaactattctcataaatgttttaattagcaaacaataatagcaataataatagctatcacattctggtaacatgctatgtgccaagctttgtgctatattttgcatacattatctcagttacttatcaaaataacccagagatagagacattattacttattttacctgtgagttaactaagatttagaaaaaaattcaaggtcacataatatgtgtgactctcataaagactgtcaagccaaagcatgcttttaacctccatgccttaaatctgaaacaccgttagttgacatctctcactgaaaataatcacaacatcgacttcttagaaagataagatacatttgtctttcctgaatatatgatttgcttttgctgttttgtggagatgttccttgttctttgtatgtgtcttctcatgtgtgtctctgtactcacattgctagctgtgcggtctttgtctcccttcctctcatgccagctagtggcatgatggagagactgtggtctagactgaggattatgacagcatacaaaactgactcaacacttacaggtaaataaaatgagcagtggtttcctttatttatttctgttatccactacatagattccatgtggatttaagaaactcaaattcaagtagaaatatctattaatagctattaaccaatcatgcatctcatgtcttaggagattctatcctgtagataaaatgaggaaatcatttattgactgcctttttgggaaataactctatggtctctagaagacatcttcgtttacttcaagtgccatggctttgagtttcattcaggaagatggtccaaaatatgagaatgtgtttattcttttaagatatgtaaattgtttatatcaatatcaacttatcctttttgggagagaaatacataagtagtacttcactttcattagttatttaacattcaaaatctctcaagtcatttaaccaggtgcaatggctcatgcctataatcccagcactttaggaggctgaggcaggaggattgcttgggcccaggagttcaagaccatcctaggcacacagtgagacctcaatctctacaaaaaagaaaaaaaaaattagcctgatgtggtggcatgtgcttgtggtccagctacttagaagtctgagtggggaggatctcttgagcccaggaagttgaggctacagtgagcagtgatcgtaccactgcactccagcctgggcaacggagtgagaccctgtctcaaaaaaaaaaaaaaaaaaaaaaaaagttattt

SEQ ID NO: 1540 - DNA, 1628 bp, Homo sapiens
aaatcgcctgaagatagtctttcaaatttggacatttaaaaaagaaacttttactgtagtcatgaagtagtatcaaagtttaccacaagtttgtattgagagaagaacaaacaatatatgctaatatgaaaaacagctctacttagaaagctactgcttgggttttcttattaggcatagttctccagactgagttggttttactcatctacatgatttttccttgccttatggaacagaaattcaggcccactcgaattcagttattttagggctctttaaaatccagtatttgtgatttaaatgatgcggagggactttcattacctgtgtctttgcttatttctctctggccctcagaacaccccaccctgacctttaggggaaattgacagaggcagagggtttcacctgcctcaattgtcaccagccctgttacattcttccttccaagccttagcctcacagggaccttctcattattgaacaattgccttcaaagcagtagaatagcccaattgttatggagattaaagataccgattgcaaaactcctgtaaataaaatcttcactgacaaacccagtttcttttcataggcttttcttctgtaatctctttctggcagaacatctcatgttttgatgttagagattcagttaccaaccacagtaaataaagcaaaataataatagaaaaatagtatagaactcaccctaaaaacaaacattggccaaccatgtttattttttgtctctctttgcactcctgagaattgataggggaagaatgtaccacctctaattcaggtgatttctgattagcaagctatggaaagtcttcaggttgagttttagccagttcacgctcccctaaatggcatggaatagactattttctgttttaagaaaaaatagaacaatggcactaaatgcttgactgaatgtttgactaaatgttgactgaatcatggataggaaagattgggcagaaaagacagccactgcctccagacacaggatgccacaatcctgggcaccatcattattccatacaaccttagggtcatttttagggtttagaactttctcaatagggtttcaagattttgaaaagtgtcttccaattctgatctccgtagatcctgttatgggaattaacctttttggaaggggattcttgttcttaaagatgaaattccctactttctttcctggagggaatcagtatgggcagagggaagaggagatggcgattctgacctgtgtgtctcatgtcacctaacacctatggggtggcatgaaacttgagctttaaaacacaccaggggccaggcacagtggctcatgctggtaatcccagcactttgggagaccgaggtgggtggatcacctgaggtcaggagttcgagaccagcctgccaacatggcaaaaccccgtctctactaaaaatacaaaaatcagctgggtgtggtggcgggcacctgtaatcccagctacttgggaggctgaggcaggagaatcgcttgaacctgggaggcagaggttgcagtgagccgagatcaggccattgtactctagcctgggtgacaagagtgaaactccatctgaaaaaaaaaaaaaaaaaaa

SEQ ID NO: 1541 - DNA, 526 bp, Homo sapiens
gtagccacacagcagcctcaatgctttgctgcttaagtatttcttccacaaatatcctagttcatccctcttaagttctgcattccattaagtcctaggacacagacacaatttcacccagctctttgcaaccttatattttataaatatggcctttactccagtttccaataccttgttcctcatttctatctgcagcctcatcagaatggcctttaccagcattctaccagcactctggtcacatacacttaagtaatcacttaagtaatctctacgaagatttagacttcccctagttctaaggtcttctttcagagccctcaccagaattgcccctaatggcagaaccgttcttggcaatgcaggcttttttctagcctgctcctccaaacttgttcagccttcacggttatacagttccaaagccacttacacactttcaggtatttgttgtagtaacaaccccacatcttggtaccaactttctgtcttagttcttttgttaaatgcctgagactgggta

SEQ ID NO: 1542 - DNA, 3975 bp, Homo sapiens
gatcctgaaatggaaaatgaagaacaaccatcctctgaaaatgattctcagaatcagagtggtgaacagatttcatcaagttctcaggaggttgatttggttgatcaagagtcttctgaggaaaattctctaaattctcacccagaatcattatctctagcagatatggacaatgctgcaagcatttccccttctgaacagacttctaatcccacagaaaaccatgagactacaaatcttaatggtgaatgtacagatttagataaccagcttcaagaacaatcagaaactgaggaagattccaatcctaatgttagctggggtaaaaaggtccagcctatagactccatattagcagactggaatgaagatatagaagcatttgaaatgatggagaaggatgagctatgacttgctaaacaatctgttggtaggtatttaaaaagaaaaggtaaactgtgtgtggttaatagacatcctaatactaagcaggctttctaatgggaggctttaagtatggtgatgaacaaccacgttctgactggcgtagttatcgtaggaatctggagcatgctgtgttagaattgaccttgtttaaaactgtcccatcaaaaatggaaatccacagttcccccttcaaatgcagcactgcaccaccctgcaacacctcaggccagggaaagattactgagcattcctgcgaaccagatttctgttgtctctggatagacaagaaacaaaattcatttagtagtggagtggggaataggagtttggatagccttctaattaaaggaagctcgcctttcttggttttgggggttagaggctcttttgggaagatgcatccgagtattgtggcattctgattatgctgccttcacaaaacactctaagtgacctaagtggttatgaagcaaatgcatttatggtgaaaacagtctttgctcattgctttctcttgtttcatttagtgacaaatgatcaagatgacttgattttttttccttcttaacaatgtcttttttatttaaaccaaaggtgaagccagtgtactttctcagtgagttctctgcataaagactaatcagtgggaccaggtaaaaaggtcatataatacattgtggagattgcttacttaatacttctgaaaaatggagtaagggagaaactgtaatgttgcaatatgaacctcccattgggccttccatagggaaagctgtgactactctgaaatggaacctagcattatatccttgtagggtagattataaatcatttccagttcatttctcttagaggtgattacctctagccatcagccttactccatcccatgtttggtatgcaatttgagccacaaggctcgtatcgccaacagctatatacattttgttccatttttctgtcttacagagccatgatagaactgtggttagtgagttaaaattcctggagtaactactgtttttctcctttgaaacttaggtttctaaagttgcacctaaggaatctgtcacattttctgttgaatcatggtttttgtttttgtttttaacagatattccttctgatacggacttgaaaattagtgtatggtgacctgtgtttaaaaaaaaaagtacaatacaactacatatagctatatagcttaatgagacttccaccccccccctttttttttttggtttgttgttgttgtagtagtctggtgctggccacatttaagtcttaaaaatttttaaattttgttgttgatgtttgtagacagccctgttgttgaaatcatggctttattcattttatttattttttaaacttgcctgaatttgttctaaaggaatatttaagagacataattttcttctctttaccataacattacacaaaactttttcctaaaacacggttgtgaggtactgatgaggtgtaagtggagctgttaaaaacagcagtgctgtattgcagttatgtatattcgtgtacagtatgtttagatcccaggtaaacatattcttttctgagaggataaatacctgcattcagatattccaggtaaatataattgagtcagggagtagtaaatctgatggagaattcactttggggaggggaaaaagaatagtatgcaagacccttattggcttttaattatacctgaaaccaaaatggatatttttagtctctctgcatgtgagatttggtgtaacaagatagaactataatatatacagtatatggaaggatagatatagtgctttgttcattttaattgcaaagctgccaaaatagttgaagcttaattacttgacttgccttgatttataggactggggcttggagaaaatgagcagatgttcctctaagacatcgattacagaagccttatatacatggatttgattttgtatttgtagctgaaagtcactgttgtctaaaactaacttttctaagttatcaaaacaacctaatttcttttccaacaaggagaacttaatggcatgaaggattgtgtgacacattggaaaagccagcttactgccactctcttcctttggccattagagggaggtgttgcctttcattgacgcttagaagcaaattgttcacttgttaagaaaagtaaatccttaaaaaaagaaaaggaaaaaatttaaccaatttttcttaatacccagaaggaattatactcaatatttccctagttaagaaaagaggagataatgttcgtctaaaaaactccaacgttgtaattacaactctacattcatttacttacttgacatactgccacaaagtagtttttgagttcattaaaaattccaaaggcattagttgttttttttttttttagtgttttgttttttagttaacttttatagacattttagtaacttgctaaagattcaggggattctatgaaaccccgaatttagaaacatctggtctacctcagttaaatgttgactgcttagaaatatagctgaagtgatcaccacagccataaaattgtttaagaaagatttatataatgtttacaaatctggaatcaaggattttagctgaaatcctttaagagatattagagcaagtatttaattcaggtattttcaagttttaaaacttaacctgtttacctactaaaaataaaatagctagtttttttctgcatataaaagttcattgaaatgatatgcccttatttgcaatacttttcccataaagttttaagtgtgaaagaattgtaatttactagatatgtttggtatgggatattttgttaggcaagttttcttttttcttcttaaattgcaataggcttccaaaaagagtataattgtttcagaacaaattaactcttggcattatacgtctccctttttctttacagtattagtaaaaagaaaaattgtacactttctgattttaacttcactaatgtaattactctctcaagaagcttttaaaatttaaattaccatcacacaaccttttttatagtaaagccaacatttgttctctcaccaaaccccatgccaaattcatcatgaagaaagctcagcataagtaattcaaatactgcttataattttagaggggggtagaatttagtaaatattccagccggtcgttttatgcacaaggcttcagtcagaacatagaaaaaaaaaacattctgtgaatgaaatattgtatgttcagattttataaaagacatttttaaaagcccaatttacagccgtatattttcttatgatgtaatttatgaaaaagatgtctgtactaacaggtgctgtaacactactgttgttggattttattgtttggtgataaatgtatacaatatttctaagggaaactatgtactgtgatgtaaaagtctgggcaaaatgtatataatcctgtatataattatgtatttgattataattactgattgtaaagatttaataaaatatgtaaatattccagttt

SEQ ID NO: 1543 - DNA, 304 bp, Homo sapiens
gcacccatggattcaaccaactgtggataggaaatattcaagaagaaaaaagcatctgtattgaacatacagagattttttttcttgtcattattctccaaacaatacagtataccaatgatttgcataacatttacgttgtattaggtattataaagtaatcaagagatgatttaaagtacatgggaggatgtgtgtcagttatatgcaaatactgtgtcattttacataagggacttgagcatccaaaatccttatctctctttcataacgtgtcacagttgagttttctatttattttccg

SEQ ID NO: 1544 - DNA, 8125 bp, Homo sapiens; identical to SEQ ID NO: 1451

SEQ ID NO: 1545 - DNA, 5786 bp, Homo sapiens
cgcaggacctcatgagtaagctgtggcggcgtgggagcacctctggggctatggaggcccctgagccgggtaagcgcgaatagatcaagcaatttaggtcgtgttagaaaagaagtcccgttcttgctcctcggagagtccagggtacttcggccacaggtggcaaggagaaaggcggtgctgttgttatggtaacagcgagtactgcgggaagggtgggatccagtaggggcttaggttattcagggcttcccctgccaccctccggccaaacactgtcgacaggctttccttccacaggagaagccctggagttgagcctggcgggtgcccatggccatggagtgcacaagaaaaaacacaagaagcacaagaagaaacacaagaagaaacaccatcaggaagaagacgccgggcccacgcagccgtcccctgccaagcctcagctcaaactcaaaatcaagcttgggggacaagtcctggggaccaagaggtgaggccaagagggtcatagttttataaggggaactttaggagcagagatagtagttagaagccgactgggctttctagaagaccgaatggacactgtgacttcagggtccagatttaggcagcaagagtctaagagggtggggaaagttgggtgtagctacggagtaggaggaggagacgcttgctcattttaaagagtagtgttgcttctctgcagtgttcctaccttcactgtgatcccagaggggcctcgctcaccctctccccttatggttgtggataatgaagaggaacctatggaaggagtcccccttgagcagtaccgtgcctggctgggtgaggatctggaggtggggaaactgggtttcttattatacccgcctaaagaaagaaggttggttctgaaatgggttaggattttccatgtcccagtattaactcagccaaattagggtgccccatctgaacaattctgtttttctttctccaacttccttcccagatgaagacagtaatctctctccctctccacttcgggacctatcaggagggttagggggtcaggaggaagaggaggaacagaggtggctggatgccctggagaagggggagctggatgacaatggagacctcaagaaggagatcaatgagcggctgcttactgctcgacaggtatgttggttcattgtttattcactcaccaaatgtatacagtattgagaactctccacgacccacgcactttgcgtggcattggggatatcgatagtagagaaaagacaaagtttctgttctcctggagctagtattctagtgtgtgtgttggggggctgggaagtaaataagtaaataatttcaaaaagctatatggtttatgacaaaaagaaaagggtgatgaaatagaaagtggcgtaaacaaacagatagaaatgatggaagagagacattagggtagttagagaaggcttctttgaagagataacatttgcaataccagaagagcttttgagcagagaccagcaggcgcacagaccttgagactggaacatgtctagcaaaggagaagaaaaagtggacaagccactgaagggctgtacgcagagaagtgacatacttggtttacatttcaatagattactttggcatctttgtagagaatgaatcttcgtggagacaagagatagaagtatggagaacaactaggaagctgttgaagtaatcagctgagaggcagtggttgctttaaccaagacgaaagtggtggagatggagaaaatcagatgaattatggctatattttggaagtagatacttgtggggaggggaatggagagaaaatatatcaaggctaagcctgggattttggcttgagcagttatccacctgatactctctattgagataagattaaaaataacaacagacctctgggaaagctggtacagttttggtgcacaggtcaggcaggtaacattactgatgcttctccccttgagagataaggacctaaagctaaatgtcaggagatctgggaggaggcagtatttatgaagaggaacctatggaaggtgtcctggagagggtgctcattaattaatatcccgcctccgaaggcctgcactgctcaagaccctgccttccatgtcccttctttcccctcccccgatctggccgacctcgcctctccatcttcctccattttcagacagcaccccgtctctgtctctccctagcgagctctgctccagaaggcgcggagtcaaccttcccctatgctgccgctgcctgtagctgagggctgcccacctcccgccctcacagaggagatgctgctgaagcgcgaggagcgggcgcggaagcggcggctccaggcggcgcggcgggcagaagagcacaagaaccagactatcgagcgcctcaccaagactgcggcgaccagtgggcggggaggccgggggggcgcacggggcgagcggcggggagggcgggctgcggctccggcccccatggtgcgctactgcagcggagcacagggttccaccctttccttcccacctggcgtccccgcccccacggcagtgtctcagcggccatccccctcaggcccgccgccgcgctgctctgtccccggctgtccccatccgcgccgctacgcttgctcccgcacaggccaggcactctgtagtcttcagtgctaccgcatcaacctgcagatgcggctgggggggcccgagggtcctggatccccccttttggctacgtaaggcccttaacccggactctgcgccccgtcccatgcccgctcttgagtatcttccccaccctattaaattacatccggtgcttcggcttgtacagaactgggggagtgggatgttgtgggcagaccagtctccggtatacacgtattttgcccctgtcggagcttgcgtcgatgcctggggcttggaaaccaccgcaaaaaaccaggctgcaaaccagcggaccgacttttgggactccgcctcttccagccgggattacctggcgtgcttcggcctttggcgtcattccgaaaacataccgcaagccaatcagcggcaaccttgctcttcggggcggctgttcgttggttgatatgccagagcctgttctgttgtctgtattggctattgccgctgtcagtcagggccgtgggtcgaaccttcacctactctttgtctgtacaagctcttgttgtctgggtgagcggcggaggcgctgctgtggattggtcacagggagaaacctctgatctgttcctattggcccgtccgtcaagggacgatgatgattggtagggcagagcaatctgagtcctagttggtggagttctgcccggatggaagctccggccgcggagtgatggtggcctcagcgaagatgggccgggcagggaccatggcggtggcagcagaggtggcaggggcggggcggctggcggtagaggaggctgtggtcctcagggggctgtaggtggaggtatggctcgggccagcagcgggaacggcagcgaggaggcctggggggcacttcgggcgccgcaacagcaggtatcccaatagctccaaaacctatcacgacagccatttgtctctttcccctttccttgtcccttccttttgggggtgggggaggaactcacggagccaaaggtactgtgaagttcctaaacatgtctcttccactctttgtctaaactttgtaacgtagatgcagctgactttgcctgtagcctcatagaacccatcccatggctgcagtggaagcttgcggtggctctccagtgaccagaggcatagtgaggtcccagggaggctccctctgtcttgcaacagttatttgtgatctttttctatgtgcctattgtcacaacagagtccggcagcgtcttctcttgagggagcaatttggagaagagctggaacccagactcgcgccctggatgccatcctttatcatccacagcaatcccatctggttgggagcactgctctgggtctcacactgcccctcctctatcctagggagcctgaggcccaggggtggaaagatccagttgcgggtggggggtagtgaaccgcgcaggataatgaaagcaacttgctttggaaatgacctaccgctacccgttgtctgagactgagattatctcagactgtcttctggcttctgccaaaacactcccttaacagaaagcaccgaggggatgggggtaggggggttggggagagtgaggcttgagtgtgaaggaagtctcatatatgcagagctgaaatctccctctttgtatgtccacacttttgtcttgttctctagactgattcttgctattccaaatcctcttccacgttgacagcccttcagatatttcaacactcctctcagcatcctccacttcccccatctctccaagctgaacttggttcacagggtgggattgtgtatgtgcatgcaggaggtgggggtggacagtgccctgggctggaatcccccttagttctaagtgcctccttgcccgcagcttcgagagctgtgcccaggagtgaacaaccagccctacctctgtgagagtggtcactgctgcggggagactggctgctgcacctactactatgagctctggtgtaagtctccaagagggctatttccaggtccctgtgtccaccctcccttggacctcagaatttcggccttcagggccccttctctgcatgaaagatgcctgagttgctccctccttgcctcttgcagggttctggctgctctggactgtcctcatcctctttagctgctgttgcgccttccgccaccgacgagctaaactcaggctgcaacaacagcagcggcagcgtgaaatcaacttgttggcctatcatggggcatgccatggggctggtcctttccctaccggttcactgcttgaccttcgtgagtgacttgatgccctgggtcagctaccagtggccctccccaaaccagaaccccaaatcgtctcacattcccttttccacacatttcaaagtatttttccctaatataaaaactagcaccctatacctggttgtcttcaaccaatcatgccaattttctcccctgcaggcttcctcagcaccttcaagcccccagcctacgaggatgtggttcaccgcccaggcacaccaccccccccttatactgtggccccaggccgccccttgactgcttccagtgaacaaacctgctgttcctcctcatccagctgccctgcccactttgaaggaacaaatgtggaaggtgtttcctcccaccagagtgccccccctcatcaggagggtgagcccggggcaggggtgacccctgcctccacacccccctcctgccgctatcgccgtttaactggcgactccggtattgagctctgcccttgtcctgcctccggtgagggtgagccagtcaaggaggtgagggttagtgccaccctgccagatctggaggactactccccgtgtgcactacccccagagtctgtaccgcagatctttcccatggggctgtcttccagtgaaggggacatcccataagtagttttgagagggtggatgggttacttgcccaccagaaacagccctagtcccaactccttgcgttcctttggcccctccctgcctacctagaatctgcctgaaagggctggagaggggcagtattgggggactgtgctagctttacccccgcaggacatacacaggagcctttgatctcattaaagagatgtgaaccagctacttgtg

SEQ ID NO: 1546 - DNA, 4332 bp, Homo sapiens
tagagttcaaaatgttttttccaatttatttagaaaaatagactctggattcacattcaccccagggctatgtgggatgacagcaaggagacacctgagatgaaatgaggaaggtttgaattactggtatccaaggggctgggggcaaaagccagaagcctttgtcccttcagagccagagtggcatgagtgtcttggctcccctcctctccctcccttcagtagtcttcagccatggccagtaagacaaggctggtccagccgtggaaagggcggcagcccatgcctcgcccatcgcggtcactgtactgctcccaaagaaagcctgtagcctggtactggcgccatacattgcctaccacgttggcacggagctcaccgtggagtttggcagcccgagcctggtgaggaccctccagatgcccatagtggtggagtgctcccaaagccaggtagttgacattgagccacacagcaccccgccagtaggggggatcatgctctgaattgcgctggccataaaaggagctggaggctgcaagggagcgtaaaccaaaggggctccagagatggcggctgtcggctagaatgtccagcaggggcccaaggcgggatgaggtggggtccagcagtcgcagcagcaagggaaaaagactgacatagccaagagcatctacatactgcagttgaggttggggccgacccaccacccgaacgagcccctgagggggcctgggcttcagctgtactgcttttgtgtggttcccaaagtctgcaaagactcctagctctggggcccagtgcagctcatccaggctctctgctgcctccagtgaggcagccagtgggcccagctcagcagctacctcagcctcacccagatgctctgccagccgcgtcagcacacgggcacccagtgccacccaacatcgcaggtccaggtgccgctcggttactgaagggtgtgaagcccgggggtagtcatccagcccagagggtagggtcttggggttcagtaaggttggtaaggcagggtcccgtccccgccagcggtaagatagtggcagtgggcctgcctggctctgatggagccaggaaaaccaggcatgcaggcggggcaaggcctttcggaggaaagccaagtcgtcagggtcaccaacctctagcatatgggctacaggcaaaagtagggttggggggttggcgtggactgctcgttgtactaggaattctggaggcacccgggctcgggcctcatcccccagtatctgctccctcccaatccagccatcagcatttagcagccccagccagtggccaagggcttcccgggtgagggagggatcccaccgctgaaccaccagctggtgaaagccttcatcccaaaggaagcctcgtgggaagaatgaccgggagggcactgctgtaaaaagaggtacgggtggaaagagggctgggtccaccttctgctcagacccttccaccccgatgtctggcaataccagcccttgtccgtagaagtagccaattccaccaaggaggccgctgagggcagcctgacccaaaacctgctcgccagagctcaggcccttctccttcagctggaaggtcttctcaaagcgctctctaaagccttcagcatggctctccagggcctgggtcagtagactgcctgccagtcttggcagggcttgatttcctcctgcctgggcactgcctgattcaaacacaaactctatggaaatgggaattttcagggtcacctgctgtatcaagaactgcccctgcccttgcccacttggacctctgtcctcccacttcagggatcctggcaagccgaggtagcgttcagggggggcccctgggggccgatgctgaaaccagctatttaggcgactctttaccatctctgtcagcaggggcagtcctgggttggaggtccagaagacattgtagcttgaaggggagaagataaataggaaatattattcaagagaaggcagtgggcattataaagagaaatacaaagtgttcaggagtcaggttgggaggtctcaggcaggggacatggagactggtgaaaatgggaataaccaccccttccatcccccaacattcttttcccccagttacctgccatacttgggggctgtatcccctggactggttggtggcaaaagtgtaaagcggaagtcaccaagttcactggtgtgcccactgataaacttcaactgccccttggccccaacctctggtagtaggacttccttgccatctgtcaccacatagaagaacagggagaccaaagggagggcagaagtacctgagtcctgagtgaccaacgaggacagaaaagaacagtgttagattggcattctctcttgaattccctcttgagaatcagccttagtgagggaaaggaacagtaggcaggggtaatgtaaacaacatacgtctggcagtaatgagggtcactgagggtaaccaggtacacccaagcgggatgagataaagagccttgcactgggtgccctgggagataacagtatacttttgtactatgtcctacactaagaactctacacagttgatttcatttaattctttttttttttttttttttttgaggcggagtctcgctctgtcgcccaggctggagtgcagtggcgcgatctcagctcactgcaagctccgcctcccaggttcacgccattctcctgcctcagcctcccgagtagctgcgacaataggcgcccgccaccacgcccagctaattttttgtatttttagtagagaccgggtttcaccgtgttagccaggatggtctccatctcctgacctcatgatccgcccgcctcagcctcccaaagtgctgggattacaggcgtgagccaccgcgcctggcttttttttttttcttgagatggagttttgctcttgttgcccaggctggagtgcaatggcacgatctcggctcagcgcaacctccacctccctggttcaagcaattctcctgcctcagcctcccaagtagcttggatcacaggcatgcgccaccacgcccggctaattttatattttcagtagagacggtgtttctccattttggtcaggctggtctggaactcctgacctcaggtgatccgccagcctcggcctcccaaagtactgggattacaggcgtgagccaccgcgcccagcctctttttcatttaattcttacagtcctgtgagttaagtgctattattatctacattgtacattttacaagcaaggaaatcaaggcttagagatggtaaatagaaatggttatacaggcagttgtttaaggcaggatttaagccaggcagccagagcccacttcatgctgcatttgctggcagcaagggaaggatggagggggtctgggctgagaaaagggtgtcctgaggccctgacctgaggctctacagtcactctccagctccagtcccctccgtgctgacccccaggcctcttgacgaactcagtggtgagccttaaggccccatcctggatgtgttggcgcccgaaggagaggccgtcgtggaactcccagccatagggacccacaccgtccccctgctcacacgtgtgcctgagcttaggagtccccggggtggtgccctgctgcgcccacatcagtcctgggggtagaatggccacgtaagtcaaagagcaggggacctgtccctccgggtctccgggtcatccctcttcataactctcctgatccattccttcccacccttgctctcgcttcaagctggggcgcccagattaggagtccgcctgcctgcccgccctggggcccggttaccggtgaggaggggcttcgggctgcgggtcttcatgccgaagtagacgtgagggcggtaggttccccagaagaggtccggggccacggcggggctggaggagtcggcaggcaacacaggaggcgcggagtgcagcgtgaccgcccgccgcgcacggtaccacgccagcacccagcgccccgacatacccagggccaaagacaggaccacgacggccagagccactcctccagccgtgctacgcggcccgccgccccggccgtcccgtcgcccggggcctccccgagccgccctctcggctgtccgcactccctctgccggcactgcgcggcgccgccgctcgccccgagccatcctggcactgaggtccgcgtcacaagagctcggagaggcggcagtggagcccgggtcctgcctcacctctccggctcccgcctctcgccctggcgaccaccgtccggttagcgacacctgccagccagcgcctgcgcctcc

SEQ ID NO: 1547 - DNA, 143 bp, Homo sapiens
tgagacggagtcccgctctgtcgaccaggctggagtgcagtggcgcgatctcggctcactgcgacctccacctcccgggttcaagcgattctcctgcctcagcctcccgagtagctgggactacaggcgcgtgccatcacgcc

SEQ ID NO: 1548 - DNA, 1936 bp, Homo sapiens
gaacttgagttagaagaacctcagctctgtagtgatcttattttactgttttcccaggataaaatgcccttggtaccacatactgtatgcagagtatttatgattgcttgagtacagttccttggaaaggacacaaggggtttcataaagcggtactaaaaatctgcttttctccctagcatttaccaacaaccttgcgatccgatggcttgaaataatggtcagagtgcatgttacccaacttctcctggctgctcctactctgtcacactgcacacagatcatgcccgccaccaccctacactccccgacctcacccaccagtcagacagtttaagtcctgctgacgcaccaggcgtgtgttggctcgtggttgtacttttcatgagtagcagggaagatacactccaggaaggtgggatacaaattattgaactgtgtgacttaaaagctccagtgagtttcgtcggaagtataggagtttgaaagtgctccccagtcaaacccagaactacatagggtcagccgtggttgagctaatttctgcttacacatgtgtggagggtgtcattttctgactacgcctaggcctgagtggacagccgattaaaagatgtaaattcgtggattgtatcaaggagagcgggttccatctttgtggtcaggagggggcccactcttttgttccgcaaagggtttatctggatgttccttgctggaagttgcttttccagtttggatcaaaccacttaagtggagctccagcctcagtccttgcaataaaaaaaaaaaagtcctggaaagccagaattttgctaatatcttacatagaatctcaatgatgggaattgggagtagaaggcagagagtggtgcttggctgatggaagttaaaagttgggttaataataaactacatttatatatcagttaacagcttgctaagtgcccacatattatttgagcttcatacttgcttgctgagaaagaatggctattattatcattatcatcattaccactttccattttatagataacaaaactgaggctctgagaatttaaagagattttccccaaatcattaaacggtgacttctgaatctggatatatgacaagacctctgtccccagtccccttgctttcacctctataatatatagtagctaagctcagctttctgagaacttccctgtcttatgtcatatttgacattataggagaattgaagatgttttgtaagtacatactttgtttactacctcagtagccagtataacaaatggcactgaagttttatgctttgcttgctaaaaccagcaccatttgtgaaacaggtcttggctccgagttacccttaaatgtaactcctttattataaaatcatttgcaaagagctgcagagatcaaggaatacactcttcccacttccctaatgccaggtagtactatgacaggacttcatagtaccacttcttcaacaaaataagtgtctgcagtgaaatatttgttaaaatgcacatttctcagtgaatatatttcttttaaaactgaaaaaaatagtacctaacggaaattttatcattgctttaaaatgtattttaatgaagatattaaaaaatacctttgatggattcttcaatattgtcgaactgctcaaaatgattatactgttatatgaagtctaaaatctttcatgcaacttacaagaatatttttgttgtatgcaacacagttggaaaattctagtgggaccatgtccatgcaattactgattatgtaatgctgtaaatttttgataagcatgttccaagttttcctgttctaaaaacaaaaacattaaaatcacccactgttgaagacaaaagatcattactttattaggagatattattagatatgtttagaactagttaaaaaaaaaaagtaaaagact

SEQ ID NO: 1549 - DNA, 1936 bp, Homo sapiens
gaacttgagttagaagaacctcagctctgtagtgatcttattttactgttttcccaggatagaatgcccttggtaccacatactgtatgcagagtatttatgattgcttgagtacagttccttggaaaggacacaaggggtttcataaagcggtactaaaaatctgcttttctccctagcatttaccaacaaccttgcgatccgatggcttgaaataatggtcagagtgcatgttacccaacttctcctggctgctcctactctgtcacactgcacacagatcatgcccgccaccaccctacactccccgacctcacccaccagtcagacagtttaagtcctgctgacgcaccaggcgtgtgttggctcgtggttgtacttttcatgagtagcagggaagatacactccaggaaggtgggatacaaattattgaactgtgtgacttaaaagctccagtgagtttcgtcggaagtataggagtttgaaagtgctccccagtcaaacccagaactacatagggtcagccgtggttgagctaatttctgcttacacatgtgtggagggtgtcattttctgactacgcctaggcctgagtggacagccgattaaaagatgtaaattcgtggattgtatcaaggagagcgggttccatctttgtggtcaggagggggcccactcttttgttccgcaaagggtttatctggatgttccttgctggaagttgcttttccagtttggatcaaaccacttaagtggagctccagcctcagtccttgcaataaaaaaaaaaaagtcctggaaagccagaattttgctaatatcttacatagaatctcaatgatgggaattgggagtagaaggcagagagtggtgcttggctgatggaagttaaaagttgggttaataataaactacatttatatatcagttaacagcttgctaagtgcccacatattatttgagcttcatacttgcttgctgagaaagaatggctattattatcattatcatcattaccactttccattttatagataacaaaattgaggctctgagaatttaaagagattttccccaaatcattaaacggtgacttctgaatctggatatatgacaagacctctgtccccagtccccttgctttcacctctataatatatagtagctaagctcagctttctgagaacttccctgtcttatgtcatatttgacattataggagaattgaagatgttttgtaagtacatactttgtttactacctcagtagccagtataacaaatggcactgaagttttatgctttgcttgctaaaaccagcaccatttgtgaaacaggtcttggctccgagttacccttaaatgtaactcctttattataaaatcatttgcaaagagctgcagagatcaaggaatacactcttcccacttccctaatgccaggtagtactatgacaggacttcatagtaccacttcttcaacaaaataagtgtctgcagtgaaatatttgttaaaatgcacatttctcagtgaatatatttcttttaaaactgaaaaaaatagtacctaacggaaattttatcattgctttaaaatgtattttaatgaagatattaaaaaatacctttgatggattcttcaatattgtcgaactgctcaaaatgattatactgttatatgaagtctaaaatctttcatgcaacttacaagaatatttttgttgtatgcaacacagttggaaaattctagtgggaccatgtccatgcaattactgattatgtaatgctgtaaatttttgataagcatgttccaagttttcctgttctaaaaacaaaaacattaaaatcacccactgttgaagacaaaagatcattactttattaggagatattattagatatgtttagaactagttaaaaaaaaaaagtaaaagact

SEQ ID NO: 1550 - DNA, 1932 bp, Homo sapiens
gaacttgagttagaagaacctcagctctgtagtgatcttattttactgttttcccaggataaaatgcccttggtaccacatactgtatgcagagtatttatgattgcttgagtacagttccttggaaaggacacaaggggtttcataaagcggtactaaaaatctgcttttctccctagcatttaccaacaaccttgcgatccgatggcttgaaataatggtcagagtgcatgttacccaacttctcctggctgctcctactctgtcacactgcacacagatcatgcccgccaccaccctacactccccgacctcacccaccagtcagacagtttaagtcctgctgacgcaccaggcgtgtgttggctcgtggttgtacttttcatgagtagcagggaagatacactccaggaaggcgggatacaaattattgaactgtgtgacttaaaagctccagtgagtttcgtcggaagtataggagtttgaaagtgctccccagtcaaacccagaactacatagggtcagccgtggttgagctaatttctgcttacacatgtgtggagggtgtcattttctgactacgcctaggcctgagtggacagccgattaaaagatgtaaattcgtggattgtatcaaggagagcgggttccatctttgtggtcaggagggggcccactcttttgttccgcaaagggtttatctggatgttccttgctggaagttgcttttccagtttggatcaaaccacttaagtggagctccagcctcagtccttgcaataaaaaaaaaaaaagtcctggaaagccagaattttgctaatatcttacatagaatcccaatgatgggaattgggagtagaaggcagagagtggtgcttggctgatggaagttaaaagttgggttaataataaactacatttatatatcagttaacagcttgctaagtgcccacatattatttgagcttcatacttgcttgctgagaaagaatggctattattatcattatcatcattaccactttccattttatagataacaaaattgaggctctgagaatttaaagagattttccccaaatcattaaacggtgacttctgaatctggatatatgacaagacctctgtccccagtccccttgctttcacctctataatatatagtagctaagctcagctttctgagaacttccctgtcttatgtcatatttgacattataggagaattgaagatgttttgtaagtacatactttgtttactacctcagtagccagtataacaaatggcactgaagttttatgctttgcttgctaaaaccagcaccatttgtgaaacaggtcttggctccgagttacccttaaatgtaactcctttattataaaatcatttgcaaagagctgcagagatcaaggaatacactcttcccacttccctaatgccaggtagtactatgacaggacttcatagtaccacttcttcaacaaaataagtgtctgcagtgaaatatttgttaaaatgcacatttctcagtgaatatatttcttttaaaactgaaaaaaatagtacctaacggaaattttatcattgctttaaaatgtattttaatgaagatattaaaaaatacctttgatgaattcttcaatattgtcaaactgctcaaaatgattatactgttatatgaagtctaaaatctttcatgcaacttacaagaatatttttgttgtatgcaacacagttggaaaattctagtgggaccatgtccatgcaattactgattatgtaatgctgtaaatttttgataagcatgttccaagttttcctgttctaaaaacaaaaacattaaaatcacccactgttgaagacaaaagatcattactttattaggagatattattagatatgtttagaactagttaaaaaaaaaagtaaaa

SEQ ID NO: 1551 - DNA, 21982 bp, Homo sapiens
gagaccatggcgagcccagggaaagacaattatcgaatgaagagctataagaacaatgctctaaaccctgaagaaatgagacgaagaagagaggaagagggcattcagctccggaagcagaagcgagagcaacaagtgagttaatgggagtattctcaaacatactattctgggaaacaagcccctatggttggcctccaccatgcaccctgacttgccctgtagaaaagtagcttactaggtgggcatggtggctcatgtctgtaatcccagcactttgggaggccaaggcaggcagatcacctgaggtcaggagttcaagaccagcctggccaacatggtgaaacttcattttctctactaaaaatacagaaattagccggacgtggtggcatgcgcctgcaatctcagctacttgggaggctgaagcaggagaattgcttgaacctgggaggcggaggttgcaggagctgagttcgtgccattgcactccagcctgggcaacaagagtgaaactccatctcaaaaaaaaaaaaaaaaaaaaaaagaaaagtagcttacttactgagtgagctactcatccagtttcctttgttgtaaataaatgttgggagctttgagaaagagaaaactgaccttatccccttttcacaagttagaccaacttagacatcatttatgtctttactgtaacattctagttctagttccttgttaccttttcttttcttttttttttctttttttttttttgagacggagtctgattctgtcacccaggctggagtgcaatggcacgatctctgctcactgcaacctctgcctcctgggttcaagcaattctcctgccttagcctcccgagtagctaggattacgggcatgtaccaccacgtccaattaactttgtatatttttggtagagactgggtttcaccatgttggccagactggtctcgaactcctgaccttgtgatctgcccagatctgcccgcctcagcctcccatagtgctgggattacaggcgtaagccaccacgcccagcctgagactataataatgcctcaccatctgcactcctacgccaccccgccaacagattcagtcacctgattattattatttatttatttatttatttatttatttatttatttattgagacaaggtctcactctgtcacccaggctggagtgcagtgagtgcagtgagtgacatgatctcagctcactgcagcctcaagctcccgggctcaagtgatccttcttcctcagcctcctgcatagctggactataggcatgtaccaccacgcccggctaatttttgtggattttttttttttttttttttttgtacagacagggttttgccatgttgcccaggctggtcttgaactcctgagctgaagtgatccacctgccctggcctcccagagtgctgggattgcaggcatgcgccactgtgcctggccaacctaacctgattttgcccacccttttgctatactatcattcctttttttcttttttttttttaagacaggatcttgccctgttgcccaggttggagtacagtggcgtgatcttggcccactgctgcctctgcctccaagtccttgaatatcttttccatgttagtaatcaatagtctcctcttctctttgtggaatacattccaggacccacagtggatgcctgaaactgcagatattactgaaccttacatatactatgttttttttcatgttttcatctttttacttaaaggaagcactttacagcttctctttggcacatttgaattgccagcatcactactcttgcactttgtggctattactaagtaaaataagggttacttgaacacaagcaattgccacctgataaccaagttggttattaagtgactaactggcagcagcgtatacagcatggaatggatgcactggacaaaggatgttcacatcctgggccagacagaacaagatagcgtgaaacttcaacactactcagaatggcatgcaatttaaaacttatgaattgttcatttctggaattttctgtgtaatattttcagaccacggttgactggataactaaaataatagaaagcaaaactgaataaggggagactaatgtataaagcttggcctcacttctcagctactctagtatatccttgtcagttatgccataatttaacattggattgttctttgttttctttggttcagagagtactcttaaccactgtctctttactttcagctttttaaacggagaaatgtggagctgattaatgaagaagctgccatgttcgatagtcttctcatggactcttatgtgagctctaccactggggtaaggcccctgcatgtgcctcaggctgacctggaaaacacctgcttctaaggacagaaattgggccgttcacatcatctaccagctttgccagtaaccatgacaagttctttcctctgtggaccctttcgtcagctttaggagtcaacaaagattcaactttgttagatatatctgaggaaacatttaagagaagccatcagttgcctcagaattaggaatcacttttcaaatgtcccaacttgaagcacctatagattaaacagaccccttctcctgagcctattatgccatcctcttgccctcagttttttagaaaacaggatgccaagcagtattatgtgctcacatctggctctaatgttggtttgcaaagtcctaaacttgttttatgttctaggagagtgtgatcacaagagagatggtggagatgctcttttctgatgattctgacctgcagttagcaaccacacagaaattccggaaactgctctccaaaggtacaaagcctggcccttgtcagagaggccttatatgatttagcctcttttctcttcactgatgtcatcaacttacacgtgccctcactcattctgctctagccctactgaccttggtgttgcttgtacaagatagacacattgctaccttcacactggatacttcctctgcctgatgtcctctattcccagatatctttgtagcaactcccttactcctatgattaaatcccaccttcaacagttttatctttttaccttgccctacatattctcctcctctccccccattatatttatcttctaacataataaaatgactcttcccactaggatataaactctctgagggcagagacttttgtttttgttccctcctgtgtcctctgtacctagaactgtgtggcacaccataggtacttaataaaaaaatttaatgtatgattggaaaaatacctcttgtttcagtatatcaaatagtcttcccaagaagagagtactggtctttcttgaaagggaaatgtgcagaccatggttgttcatcccttaggtggttctctctcccacacctttctttgcttacatttagtaagccaaagatgaacattcttaaattaggattggctttactctttaacattccagctgtattatacagttcaaagacgagtagatattgttaaaaccaccttaccagaagggagtttgggaatgtttgtaagggtggtcagaagtgtctaagaaggattgcaagctgacccccatgaagggatcagcaaaagcttctcctgtgtttttattttcccttctcccttatccagagcctagtcctccaatagatgaagttatcaacactccaagagtggtggatcggttcgtggagtttctgaagaggaatgagaattgtacattacaggtgaggcctgaagggaaggggtttgttttgtcttttaatttttgggggatacatagtaggtatatatatttatgggatacatgagatgttttgacacaggcatgcaatttgaaataagcaaatcatggagaatggggtatccatttcctcaagcatttatcctttaagttacaaacaatccaattatacactttaagttattttaaattgtgtagttattattgactatagtcaccctattgtgttaccaaatagtaggtcttattaattctttctgggtttttttgtacccattacttatccccatcccacccccagtcccccactactgggaaggggttattagatgaaagccctacttccaagaaattgcagtgggatacttctattgacatatctctcaggaagttcaaaagtaatgttaggaaacattcaggagaaaccatcagttccctcacagccagaatctcttccttaaaacaatttcaaaggaaaggcaccagactatgatagactgatcattcagttataaatcagaggctatagtccactacctgtgtgacctgaggcaaattgtttagcctctctgggtctcttgtttcagagatgggtgatgggtcaatccattggaacttgccagaactcagctgaaagggactttgagagacccatttcattctaatcctcatttcagaaatgaagaaagtgaagctcaggaaataaaagagtgacctggcaaaggatgcatgggtgttgtggtagtgcaggactaaacctgggaccctggaagcccaatgtcttattctcatctatatcacatcactgcatcttcccactctctaaagacgggaggggaaaggcttgtattttatgtgtgtgtgttttaaattcgtgggcaagaggcttgcttgtgttttgtgaggttttgttttggttttttaaattcatgggcaggaggcttactgttctgagccagctgataggcatggctgctcagtctgaaatgacctttcaatcattgcttaatctcactttcagtttgaagctgcctgggctctaacgaatattgcctctggaacctctcagcagaccaaaattgtcattgaagcaggggctgtccccatttttatagagctgcttaattcagactttgaggatgttcaggaacaggtaatgcttagatttggtgtgattctttatagtacctgtggtataataaaaaatatatttggtctttgtcctggttcttggcacagtgttaaaactcttggaatttcctgagtgataggggtgtcaagtacagatggcccctgggacttgcaactggtatctcaagttggggcagtcttgtgggactaacctgcggactctgcattaactctaggtgttagagtcagaattgaattaaatcgttggacacatggttggtatcagagaatgggtggttgatgtggaaaaaactctatacatttgttgttggaagtgccattggaaaaaagacaccacagtacccatatctgagtacccacaaatcatggagataaagatacaacttccatttctcccattgaattcttactagttggatagaattggagagtggtagtgggctcttttatagacttggtccaaggcagctacaagagtgcaactttcgccaggcgcggtggctcacgcctataatcccagcactttgggaggccgaggtgggcagatcacgaggtcaggagttcaagaccagcctgaccaacatggtgaaactccatctctactaaaaatactaaaaagttagctgggcatggtggagcttacctgtaatcccagctattcaggaggcttgagacaggagaatcacttgaacccgggaggtggaggttacagtgagcagagattgtgccactgcactccagcctgggtgacagagcgagactccgtctcaaaaaaaaaaaaaaaaaaaaatgcaactttctgattactttctccttttctgggcgatattgttttggcttctgtggctatagtacagatggcagcctgtctttccctgctgaaccaggaactcccagggataggtcattgtagaacaagtgctcagtaagaatttcaatagggaggttacctgagcttgtgtagtatatttggggccttgacatcattctcatcctggtgggtactcactttgcagttgtggctataaagtactcacaggagtaccaagctttgtgggtgacagtttcattatccccttttcaggcagtctgggcactgggaaacatagctggagatagctctgtttgccgagattacgtcttgaactgttccatccttaatcctttgttaacgtgagtaattataatcatctgtacctgggcgtctactgggtggccacgtggcaggtcatttgggggcagcatacttgattccttaagatgataggtaagtgcaaaaactataaaaatgcattctgattgccaaagtaaaagataggtatctttggagattgagaaggttgtggccgggcatggtggcttatgcctgtaatcccagcactttggtaggccagagcaggtggatcccttgagcctagagttcaaaaccagcctgggcaacatggtgaaaccccaactctacaaaaaatacaaaagttagccaggtgtggtggcaggcacctgtagactcagctacttgggaggctgaggcagggaggatcacctgagcccagggagatcaaggctacagtgagctgtgattgatcacaccactgcacttcagcctgggcaaaagagtgaaaaaaaaaaaagattgtgccacccatctgccaaaaaggatcttgttcctcacttcatggcactgcagaacctcatgttagtcatatcctcatatcctcctcattgttgagccaggggagagaggcaggactagcccacctggaaaaatccaaccttctctacaaaatgcattgatttgttatggggttttgcatacatacatcggacagctctgtcgtaaattatagatcaaagaccccgtgaagcgtcattgtatccttctcccatccttccctccgtacccttagagtaaactatgcctaaaccaaaacagatgaatgaactgttcttcagagaccacagtctcatagcctaccactgtcactttcttggacccttcacagaaaattattccatactgtgtggctaaagctctcacagtagacctatagcttttatttcttagacttttagcttttatttccagagaacaccattccttgtcctggacttgtggccagggttatgggcatgatatatcccactttagaagctttacaggcttactccagatctagccctctgtttcgtccctattatctatggtattaactagccacagctggtcctgaaatgaatactctgtatagagcctggcctcctaacctataccagctctattaacttaggtctgtgagtaggaagaaacaggctgctagagtctgagaggtctcattggatttgtctctgggttcattggcaacagtcctatgccaaggcctcagtgctcaggatctggctttgctgtttccttcagactccttaccaagtccacacgactgacgatgacacggaatgcagtctgggccctgtcaaatctctgccgagggaaaaacccacccccagagtttgcaaaggtgagagagctacttactagaccctgagtgacatcaggttccttcatatggagtttttaagtctttgggatactccttggagtctcaaatcatgggaaactgaaagaagcaattgttagtgaagtagatgatcttgtgtacctggatagtaaagtgaaaaggtagacccaaatgtttaatgtagtagcgatccctagggtctggaattacttgtgtgtgtgtattgtgggggcggtggttgcaatgttagggttcgtgatagagctgatatagtcttgttcccctgtgagtctttctcactctgcttcccacaggtctctccttgtttgcctgtactgtctcgcctactcttcagcagcgactcggacttgctggcagatgcttgctgggccctttcttatctgtctgatggccccaatgagaagatccaggcagtcatagactccggagtctgccggagattggtagagctgctgatgtgagtggtcttagaaggggtacaggttctggctgggcacggtggcttatgcttataatcccagcactttgggatgccaaggtgggcggatcacaaggtcaggagttcgagaccagcctgaccaacatggtgaaaccccgtctctactaaaaatacaaaaattagctgggcgcagtggcaggcgcctgtaatcccagctacttgggaggctgaggcaggagaatcatttgaacctgggaggcagaggttgcagtgagccgagatcgtgccattgcactccagcctgggtgacagagcaagactccgtctcaaaggaaaaaaaagaatcccagcactttgggaggctgaggcgggtggatcacaaggtcaggagatcaagaccatcctggctaacacggtgaaaccccgtctctactaaaaatacaaaaaattagccgggcgtggtggcgggcacctgtagtcccagctactcgggaggctgaggcaggagaatggcgtgaacccgggaggcagagcttgcagtgagccgagatcgcgccactgcactctagcctgggcgacagagcgagactctgtctcaaaaaaaaaagaaaaaagaaaaaaaaagggtacaggttccttaagcttctccaggctcagactaaagagagagaatcagcagggccgaaaatggtgtgctggccttctgatcagatctccctcctctgtaggcacaatgattacaaagtggcttctcctgccctgagagccgtgggtaacatcgtcactggggatgacatccagacccaggtaagaaagaggagggtgcaggatcttagaccagctatggaagagcttgtggagagctgccagtggacaaaagcctttcctgcaaagggctgtggtcctgatgggaggcactatggtctaaggaagtaagtgtgggcttgagtgaaaagttccagctctgttattctctaaacagtcatgggaaacttggttccttcttttcttacataaattgggaacaaatcatcgtctaatgggtgaaggaaaactaagtggaataactggacttaccacctgggacattgtgagttagttaagtttgagtcatggtccctttgagatactgaaagctatggaactccacccctgcttcctagatctttaaggtctcatggatatcatggaccttggaataatcttttgtaaataacccttctggtgaaggcatagtaaacaaagttcccctgctcaaaggctagagatttgggtattctttgggttttgagtagcgagcataattctgtgggattctggacaggtttcttaacaggtgagtagtgtcactcaaacactcaaacccacatgctcattttctgggttactttgtatatgtatatgcatgtactttaaaatacaacataaaatttaccattttaaccattggcataaagtacattcacattgtttttccgttattgccactagccagctacagaaattttttatcatctcaaactgaaaccgtacacattaaacagtaactccccattctcccttcccctagtgcctagtaaccaccattctattttctgtatctgtgagtttgagtgctctaagtacctcatgtaagtggaatcatacagtgtttattctttctcgtctggtttatttcacttagcctagtatctttaaaattcgttcatgttgtagcatgcatcagaactcctttgaaaggctgaatgatattccactgtatgtatataccatattttatttatccatcaatagacatttgggttgtttccaccttttggctattgtgaataatgctgctatgaacattggtgtacaaatatttgttcaagtccccggtatatacccagagtggaattgctggatcatgttctaattttatgcctaatttttttgaggggacaccatactgttctgcacagctgctatgccatcttacattcccaccaacaatgcagcatgttccagtttccccacagccttgccaacagttgttattttccgttttttgttttttgttttttttttgataatacccaccctaatgggtgtgaagtgatatttcattgtggttttgatttgcatttttctaatgattggtaatgttgagcatcttttcatatgcttattggccatctgtgtattttttttttttttttggacacatgtctattcaagtcttttgctcatgttttaattgggttgttgagttttctggttgttcaattttaggagttcttcatatgttctggatattaatctcttatcagacacatgttttgcaaatattttctcttgttctgtggttttatcttttaactttggtgtctttaaaaaaaaaacttttaacttatttaattttttaaaattgagacagagtctgtctttgtcacccaggctagagtgcaatgatgccatctcggctcactgcaacctctgcctcctgagctcaaagcagtccttccacctcagcctcccaagtagctgggactacaggcatgcaccatcatgcctagctaattttttgaatttgtttttttttggagagacagggttttaccatgttgcccaggctactcttgaactactgggcttaagcaatcctcccaccttggcttctcaaagtgctgggattacaggcatgaagccacctcacccagaccaactttcttttcttttttaattttttttagagggtctcactatgttgccccagctggccttgaactcctgtgctgaggtgatcctactgcctcagcctcctgagtagctgggactgcaggtgcataccactgtgcccagcttactccaatgtcttgatgcacaacagtttttcattttgattaagtccagtttacctgggccaggtgcagtggctcatgcctgtaattccagcactttgggaggctgaggcaggaggatcacttgagcccagaagtttgagaccagccctgcaacatgggaagaccctgtctctacaaaaaaaaaaaatgttttttaattagcagagtgcggtggcaccctgctactcaggagtccccagctactcaggaggctgaagtagaaggattgcttgagactgggaggtcaaggctgcagtaagccatgatcatgccactgcactccagcctaggcaacaaagtgagaccctatttaaagaaaaaaaatgaagccgggcacagtggctcacacctgtaatcccaacactttgggaggccgaggcaggcagatcacctgaggtcaggagcatgagaccagcctggccaacatgatgaaaccccatctctactaaaaatagaaaaattttccgggcgtggtggtaggcgtctgtaatccaagcgtcttgggaggctgaggctggagaatcacttgaacctgggaggcggaggttgcagtgagccgagattgtgccattgcactccagcctgggcgtcagagcgagactctgtctcaaaaaaaaaaacaaaaacaacaacaacaacaacaacaacaaaaaaacataaaaaaaattaaaaacagtttaatttttcttttgtttcctgtgcttttggtgttctaggtcattcttaactgttcagccctaccttgccttctccacttgttgagcagtcccaaggagtcaatccggaaggaagcttgctggactatttcaaatattactgctggcaacagggctcaaatacaggtaaaacaggcagggaagtcaaggggcatgggaagtcataggaacttgggaggttgttggaatatttgctttcagaagaaagaatttgtttccctttaaaaataggagtcaattggccaggcacggtggctcacgcctgtagtcccagcactttgggaggccgaggtgggcagatcatgaggtcaggagtttgagaccatcctggccaacatggtgaaaccccatctgtactaaaaatacaaaaattagatgggtgtggtggcggacgcctgtaatctcagctattcgggaggctgaggcaggagaattgcttgaacccgagaggcaaaggttgcagtgagctgagatcacgccactgcactccagcctgggcaacagagcgagactccgtctcaaaaaaaaaaaaaaaaaaagaggggctgggcatggtggctcatgcttgtaatcccagcactttgggaggctgaggtgggcggatcacaaggtcaggagatcaagaccatcctggctaacgtggtgaaaccatgtctcttctaaaaatacaaaaaaaaagaaaaattagccgggcgtggtggcaggcgcctgtagtcacagctagtcgggaggctgaggcaggagaatggcgtgaacctggtaggtggagcttgcagtgagccgagatcgcgccactgcactccagcctgggtgacagagcaagactgtctcagaaaataaataaataaataaattaattggagtcagtgtgtactattggtcaaagaagctgtgtaaccaaaactgggttcttctgtagtagcctgtcacctatataggaagaacaaaagaaaactcccagaatggggaagatgtctaagtctcagctgatttggggactagatttatttatcatgctgaaatgactttctccttccatctgcctcctctcaattctctctcaggctgttatagatgcaaatatcttccctgtgttgatcgaaatccttcagaaagcagagtttcgtacaaggaaagaggcagcctgggccatcaccaatgccacatcaggaggaacccctgagcagatcaggtattacattcctttcccgttgtcttgaatgataatggatgctctccctgtttgctcatggtttacaggtgacctataaactgctcttgctcagacaggtctgccccctagtctcactgtaatagaattttactggtaaactgctacagtgtcactagaatctggaatagattccatgtaagccatgtgggaatctattccagattccagtgacactataacagtttaccagttttcccttctggagaagagaaacatgacatggacatccatcctttctctaccttttcttatccaacagagaactgaaatctatgtagttctcaattcaaatgaaggggaaccgtactatgggttactcaaaacagtttcttcagcctgaccaacataagaagactctgtctctacgaaagacaaaaattagccgggcgtggtggcatgtgcctatagtcccagctgagatgggaggatggcttgagcctggaaggtcaaggctgcagtgagctgtgattgtaccactgcactccagcctgagtgacagagccagagtctgtcacaaaaaaaaaaaaaaacaaaaaaaaacaagcaagctggtgtagtggctcatgtctgttatcccagcaccttgggaagctgaagcaggaggatcctttaaacccaggagttcaagactagcctgggcaacatagggactttgtctcatgtgtacaaaaatgtaaaaattagcaggttgtagtggcgtgtgcccgtggccacagctactcagtaggctgaagcaggaggatcacctgagcccaggaggtcacagttgtaataagctgtgattgtgccactacactccagcatttgctacagagcaaggtcctgtctcaaacaaaaaagcagcttctttgagaaattaatttgggatatgagacttgaaagaagcgaatagaaagctattttgtgtatgtgtgctctttttgagaccgcaacctctgcctcccaggttcaagcgattcttctgctttagcctcctgagtagctggggttacaggcacgtgccaccacgcccggctaattttttgtacttttagtagaaacggggtttcaccatgttagcaggctggtcttgaactcctgatgtcagatgatcctcccaccttggcctcccagagtgctgggattataggcatgagccacctggcctgtgtactcttttattttagtttacattatctgaacattagtggaaagtggtgggaatagttaagtgttttgcccttcacttgttgcctattaaggggagcacagttagtatatataaagtcttaggagaaaagagatagctgttgagttaagctttgaaggataaatatgggattgtaaaaggcctcttagacagggaaaagcataaataaaggtacaggaatcagaaacctggagacctttacaagtgtgactagaatgtattgtccttggaagggaataatgggaggcagagctagaaaggaactaggagccagattgcagagcatccaggctgggctgggcttgtggtattatggtattgttgtgccatagaatttggagttcagcgaattagggagcctgtgaaaaattttatgcagggaagtaatgtgttcagaggggtaatattgcagccaaggagacattagaggcaaggaggaggagtgtttggtagcatccacatgtgaaatgaactagaccaaccacatgtgaaatgaactagaacaatatcaacaggaaggtagagagatagagaaaggataagcggttatcaaggctcagtaagagcagtggctcacacctgtaatcccagcactttggggaggtcaaggtgggaggatcgcttgagaccaggaatttgagaccagcctggacaacataatgagactttgtctctacaaaaaataaaaaataaattagctgagaatggtggcacacacctgtagtcccagctgtttgggaggctgaggcaggaggatcacttgagcccaggaggctgcagtgagctgggatcgcaccagtgcaccccagcctgggtgacagagcaagaccctgtctcaaaaaaaaaaaaaggacttggttggggaacactctcattctctggcatggaatggggtgttgcacaattcttttttcttttcttttctttttttttttttgagacggagtctcactctgtcgcccaggctggagtgcagtggcgtaatctcggctcactgcaagctctgcctcctaggttcacaccattctcctgcctcagcctcccgagtagctgggactacaggtgcccgccaccacacctggccaattttttttttttttttgtatttttttttagtagagacggggtttcaccatgttagccaggatggtcgcgatctcttgacattgtgatccgcccacctcagcctcccaaagtgctgggatcacaggtgtgaaccaccgcgctcggcctcacaattcttaaaaataaaaaaataaattagtaagagtgggttgctgagagttcagagcacctgcccagcacttcatgtgtcctgtactagtttagcacttgcctggtctctggcccctaggtacctggtctcactgggctgcatcaaacccctatgtgacttgctgactgtaatggattcgaagattgtgcaagtggccctcaatggactggagaacatcctgcggcttggagagcaagagggcaagcgcagtggctcaggggtcaatccttattgtggcctcatagaggaagcctatggtatgtgccctctcctcaatctaggtcagaacctgagactgtaggcctccaacgtggtatacatatgttggtggtggcggagtgtgggttgggaagcatccatagcttccatgagactgatgtctgtgtcttcagaacagttaagagctcctgccctagccaagtttcaccatccacagggtttcacacgttaccatgagtataatcaggatgtgctgagtagctggggtacagctaggatttggatttggctcatcttttgagttgagagttgtctctcaccagtttcttctccttctaaggagtgataggtcagttctctttctgataggctgtacctataagagtgctggattaactcatcactcatccctgagaggctgatgatgtgcccaggtcatgcttctagtttaaagcagaatcaggactagaacctctgtaactgacattttggtctctttcctttgggattctgtagttttgagaagaaatcttaactctcccctttcaggtccaagagtgatctgatcatatgacttgtgtttgtaagcactaacatacctcagggaaggaaaaataggtaaatgtttcacctgcccatagaaaagcactcacacttccctctccttccttcttactactgtaggcttggataaaattgagtttctccagagccacgagaaccaggagatctaccagaaggccttcgacctcattgagcactactttggtgtagaagacgatgatagcagcctggctccccaagtcgatgaaacgcaacagcagttcatcttccagcagcctgaggcccccatggagggcttccagctataatatctgcctccagggaggggaggggatgggaagcaccaccagccagcggaagagcagccctctggtgggcgggaaaccagtgtccccaccatcagccaccacacacctctgctgccctggagactgtgctcttgacctgctccgcccccttccctggagggagcaccctctggacagacagaaccatctgaggctcacctttgggttttgtgacaagaaggggacgtgttgggtttttcttccttacactatattttggctgcacacatgtctttaacccaggagcccaggggtagacaaaggaggactaaggtaatcaatttgcacctttttttatttttattttttttctttttttcttcagtggtgacttccttccctttatcttttttcattcttcccggtcctctgccctgatctgtgtaactcttatcttgggtacttgagcagacggtatattccagaggtgggaggtgggaggggaagggagaaatccaaaacaaagtgttcttgctctgacagaatattaatcttgtacgcttggattgagttatttaatttttttttcttttgcacatttttcttgtattaagattgctcttcccaagagccacaagttcctggttttagtaaacccagctgcctgcattgcctgggactagaggctggggaggctaccatgaaacaaaggtccctccctccctctgactctttgcccagacctctttagtttgggggatcctcctcactctcctgaagtgtctcaagtataccagtgggagtgcaggggaggagcacaggccttcagatggggcttcccacgtgtagctactgatcccatatttcctactcaccttccaaatggtgcgacccaacttcatttgtttacttgaaaattccccctcgaggttgagagaacctctgaggtggctgtattttctcctaagcttgagatagggggctgtggtccttcctttctcctgaggagaaagtccttgctctggtgacctgtaagttgcagaggagggtggagtgagagtgtcatgtattgggatagtcagggatccctgcctttggcctttcttcttcttcttcttcctcttccatagttggatcatgtatattttacttctaaaggagagaatgtcaaaaagttctgtatttttttatattctatatattaggtaggtcaatcttaattggtctcaagaggaagaactgtctgtcatttcggtaagtaggatactgtgaggaagaccaaaaagagatatggatgcttcctcgctcaggaggcctgagcttggtccttttcctctctgcttggattctggaccaccacctgggaccaaccttcagctctggaaccttcataaagcaggtcagcgtggcctgattgtcccaggacctgaagggagcaaggatggcctcagggcctggtgaagtctgctactctgtccttactgctgaacatcctgcttgtatcaggaaactcagaagcagtttgccttgtcaaattcaatctcaatggccattgtccacataactgatcacccatggctgcctctcctattatctattatcactgaaacttagtagcctgctttttttttttttttttttagagctattgcgtatcttccctgtttgggatccttgtacctggtttgggttttcccttccttgtgacaattataatccagatgcctcttctttctgtttgaattacggtagtgcattgccttagtggcttgcctgtgcctctgggtggattacatatgatagtaaagcccacctgtttggatgggagtagaggaagttggtgtagaccagctgtggagctgaaggcacagtctgccccacccccacctccccactgtggttagtcagaggcatcctgctccaagctctgcttttccttcctctgaaacaatgccattcttgcttctattgctacacatctccttctggctcaggtgaaatccatgcccttctgcttatagacctaaagttcaggtacttattattggccattgatcttgaatttgccctctcctagtgctgcagtcccacttcaaagccattttctgaggaggatggtttaggtctggcaattgtccttgaaaaatcccacccatgttgtaccaccttggtgagtcatatgccactcatcagcttgggaatgatggctgccaactcccaatctcccaggaaggcagggggcagaatctttttttcacttggcctgctacctccattaaaaaaccattctcttacagtttaaaaaaaaaaaaaaaaaaaaagccttcccctacccaacctccgcccattgttctcttccaaagggcaatttagtaggatctactttgtacatctcaagtaagagttaagtccctgatacagggaccagtttcttagtgtaagacatacacatcctgcttgtccagctgttcctccaaaatctactttggcttcagctccgggtcctgtaccagatggaaaatgtttttggtgatctggctgctgcttaaagccagttttccctaagaactccaaaggctaaagtctactaggggcagagtgtgaggatagatttctaatcagagaaaagtggcctccaggagctttcatttatgtcttctccagaccaggttttcctgttatcttcctttaatcccctttcaaccaacaggtgaagttcttccagcccacagaggtagtaatatcatcttttctatctcctcctctcctttggccatgtaatgaagcaaaatattatttatttagcccaggcttgagagccactgtttgtggacagtcttcatctagattccataccctggcctaggcgaggtaaggctctctggttattgccaggatggagcccctctaccccagtctgctgtagggaataccctaattagttgaggcatgcttttggaatcctggcatgttggcatatggctggtctatcctttttaagatctctggttgggggtatctggatatggattaggagggacaaggagcctttttcttggctaatgttttccaatacttttttgaatggtgccagcccctccaggcatcccacccccaaatcatcatctttagtactaacagggtgtctggtcttagaagcctcccttcagatcccagctgaccctggtgactgcctggccttgatgttggctgcagccttctgatagaaccacatggattccacccacagctggccaggcttgttacatgggtcagggaatacaaatggcccccccccagggagcaggtgttggcctcagttttcagggacccttggtgttgctccttacctagagcccattaatctaccccatcaactctctgccatgaaagccatcttccaggagccctgttttttggagctgaactgcacagattatagctgctattgtacttaaataagggagaggaaaagaaggttctcaggcacagactttctatttttctcaagccaaaccagtttaaaatgtctagcagaatgaactgtatttccatttcttcatgtctacctgccttccccccacaccctaaagttgtacttgtttctagcaaactagaaggaaaagataggaaagcctggcactactaacctcacctctcatacacctctttgaaggccccagctcttttgttcaggcctctcttctcccctagactcactcagcttggtatccatcatcttgagcattcttcagtagattcatctagggttcagattccagactctcagctgaagacagggagccaatttcccccaggtccctgcaggtaatccagggaccccatagggagaacaggctgactggggcattaggaatgtttgtacctctctgcttccctggcagcctggggaagggtgcagggctcagtgcgctaaaccatggtaaacatcttcaatagaactaccctagaatttagtgagtgtgagactgagatattgctcagaataaatttattccatagccatttaggattgcatgttctggaccaaccttgtccagtatgttttctgtttgagctttttcattcttttgttaagccaacaagttgagaatttggccctgctgggatccatgtagtgggcactagctgctctttggccaaggccttcataaatgattcagtctctcattatctgtcctctagccccacaccctgatttagaccgtggcaaaggaagaacttgaggtcaagaccaaccaaatctgtgaattaaagctgttatttttttctctgcaagggcgctttgcttcaggtctgggctatgtgcagaacctaagcaggctgtgagagttagaagaggcagtattacatgttaggcccagaacaccatgggaaaaggtttatgtagtgtatcttagtggcctgcctagctgcctctgggccaggctgacttctgatgtccacattagctcgtacctgaaccctgttgctgaatgccagccctgttctcctgtaactattatatacgccatggcctggggggcattgaaggaagtaagctctcagagatcctaacactggctgggaacctctgactcagagcatgtctttaaagagtccacatctggccaggcgcggtggcacatgcctgtaatcccagcactttgggaggccgaggcgggtggatcacgaggtcaggagtttgagaccagcctggcaacatagtgaaaccccatctctaataaaaatacaaaaaattagctgggcgtggtggcaggcgcctgtaatcccagctacttgggaggctgagacaggagaatcacttgaacccaggaggcggaggttgcagtgagccaagatcatgccactgcactccagcttgggtgacagtgcgagactccatctcaaaaaaaaaaaaaaaaaaaaaatccacatcttcagctgggcgcggtggctcatgcctgtaatcctagcactttgggaggctgaggcgggcagatcacttgaggttaggggttcaaaaccagcctgaccaacatagtaaaaccccgtccctacaaaaataaaaaaataaaaaaaataagccaggtgtggtggtgggcacctgtgatctcagctacgtgggaggctgaggcaggagaatctcttgaacctaggaggcagaggttgcagtgagccaagattgtgccagcctgggcgacagggtgaggctcttgtctcaaaaaaaaaagtccacatcttcatgaaccctcagactctggagttgggtgtcggcttttttagccagcttttgtgggaattgcctttgacctattaaagaaggaaagtgggtaatggagtcccagccactcaagagactggatatcccccgagaatggcttgggttaccagctatggacccttggaagatgaatctaatccttctcactggtttttctttgcaaattcatttgcttttatttttctaataacaataaactctattttccatgttctcagggcccctgggtagacagacacagcttgatttcagagcagacataggcgaagaaaacatggcattgagtgtgctgagtccagacaaatgttatttatatacacatccaaatttgaagagaaaatgtatttctttaggtttcaaacactgtaatagatataaagcaaaaataaaaacctgttgcaaagttctaaa

SEQ ID NO: 1552 - DNA, 98 bp, Homo sapiens
cctatagtcccagcactttgggaggccaaggcaggtggatcacctgaggtcaggagtttgagaccagcctggccaacatggtgagaccccgtctctac

SEQ ID NO: 1553 - DNA, 110 bp, Homo sapiens
ccgccaccacgcccagctaatttttgtatttttagtagagacggggtttcacgttggccaggctggtcttgaactcttgacctcaggtgatccgcctgcctccgcctccc

SEQ ID NO: 1554 - DNA, 2144 bp, Homo sapiens
ggaatgggccactgattcatttcgtggttaactggaatactgctttttaattgatacccagctgtatctaaatcattacaatactggacagatagtgtagtgcagtgtatttgaaatgcagtgctttgtttggcaaagatttatttaatggtttcattttctctgcaagaagaaaaaaagcagatcatcgaagctcttattatttgcactgtggcagattcacttgagttcagaagcctagggaaaaggtgggacttttgaaactagggcagtaggtaaatgtggacacaccttcgtttgtatttgattagggatctgacagcgtgcatatgtgtacaggtttgcacgtgtgcatacacacatatacaaatcatagaaaaccataggtgttctgtgagagagaaaattttgctacttaaatacagcgtgaattctcatcctgatagttgcagaaaatatttcttttaaaatggagattaatgtctaattccatataaagaagattataggaaaggtgatttaaactgtaagtagctttgttcaccaaaacgctagatttatttgaaacagtgttttatttcttttggaaggcagacaactagtttaatagtgtacatatgaaacgctaatttggcttgttaattggatgcaattaaattgaggttattttatactgcttaattgttagaaaattacatgcgttgccatgcctgtgtaatgtgaagcaaaagcgaagggtatagcaggagtgggggtgggagggacgcaagatctagtcctgtctttgcaattaactttctgtgaaaacttggaaacaagtcatcgaagctctttggacctcatttggaaatggaagagattggaacagatggctcctaaagcttcttccagctcatattctatcagtttataaattctactttgtagttgtagagaatgcaatgtcattatattctgtaattatggtattacaaggatgaactaaacacttaaaaaaatcagcacagtgccaatttagcaaatccgttagaaggaaggcaatttaggcttaaagagcactcacctgtgccaggctccatcccaggctctctctccacattacgtcacttagccctcacaaccaacctgagaagatttagttttttatcttgatgtgtatacttaaagaaacttccattcggaaaggtttttgtggggatgctttgctagtcattggtgaagcaggattccaactcagggttctttggctccgaaaatgctttgtctttttaccatttcacgcagtataagcaattgtttacacatcaaaattatttcaaatatttaaaaaaggccaaccatatttatcacttagcacaatgtttccccttagtagtatatggataaacaggtagcccacgggattaagaacctcgatttgaagtcagacagaatagggcaaattccagctccaccaccacctgggggaatttgggtatgttacttaacctccctgaggttacaaaatgaggataatacccattcaagagtcattgggaaatttttatgagaatgtttgtacccatctcaatgagcacatagtaaacgtttaatacctggtagctatgggttattattaacaaggtattagactataagaaaaacataggacaattcaaattgttgtgacagtaaaatattaaatattttcaaatggtccattaaactcttgactgaaatggtttaagaaacaatgttagaatgacatggtttcacatttaacagttaacaaatggaaatatcaattaaaatctggggtgtttctcactgagctcagccagtgctatgccaatgaagtgaactaaattctctggttctttgtggaaaatcattctgaagtttttgctctaaaaatagcttttggggcctgaattaccccttaccccactcgaacttctgtgcaagagccagaggaccagtgattactcgtggggccttgggcctacttaagagactcaacttgggtgttcacaggactgttgactttaattctaaaaaaatttattaattcaacagagatttattaagcacctgctctgggaaagggctgttctagacactggagatccatcaatagacaaaaatagtaaaaaaaaaaaaaaaaa

SEQ ID NO: 1555 - DNA, 2144 bp, Homo sapiens; identical to SEQ ID NO: 1554

SEQ ID NO: 1556 - DNA, 517 bp, Homo sapiens
aactttattaaaacttacaattgggagtagagtataaatggaagcaggattttttccaactggaaagattagagggttcttatgagaggaggtgattcttttttttactgaggatcttgaatgttaagtagaatttcactgagtaaagaagggagtcaggagctcctcatactctgacctgggatgggaggggacagggatagtaccagggcagaggaagagttgggagcctggaaaggtacgtagctccagatcttgtggtgcctcaaagacctgcagagaaagctggacatcactgaaggtttttgagcagagaggtgatgctataaagtgtgtgtttcagaaagcttatgagggtatatgggatgaatatctcggtggcaaggagacagttagattgccaaaatatcctaaagagaagtaatgaaagttgcccctactgaatgataatatgaattcttttactctgttaattgatgtgtttaaaagtaccctaaaagtaagtaacaaaagtgat

SEQ ID NO: 1557 - DNA, 517 bp, Homo sapiens; identical to SEQ ID NO: 1556

SEQ ID NO: 1558 - DNA, 1695 bp, Homo sapiens
gaagcaaacttgagtttcccatgctctgtggctgagcaagtcacttcaccattctcaggttcagtttcttcatctgtgaagtggtattataagggctgttgactgcttagggttgtctaagtgcaaatgttgctgtgggttgggcaggaatgctttaggaaatacaaaaagccatagacagaactgcactgtgatgataaaagtcatttagacactctggaagctatagagctggaaggaacttcagaaataatagtaaagaggtttcagtcttttatcttgtgaagatgcacagatgaatcgtgggcaggagcaggacacattactttggtggctcagatttttggtctctcactttaagaggcacctaaacggcaagcaaaatgccatcgctggcattggctccttctccactccactctcactcactcaagaaagcataccagaatgttagtgagagaggttattataagggtaaccttgatttcactctaatttatttttcaaaaatgcaaactcaggattctcacatggaacaaaaccctgacccaaaccaacttaagcaagagttgatatttattgactcgtgaaattaaagaatatccagcagtagaggctttagtcctggctagatccaggggatcaaatggttttgtcagaacttagactatttattcatctctaggttctacttttctttctatcgacactgtcagacagagtcttttcatgagtgataaatggctgttggcaggcttcggtttgtatccccaaagcttagcaccctctgtgaaaagagagctttcttctcccaatagtttcagtgttaagttctaggattaagactcattggactgacttggaatcactgtcccctatccttgaatcagccactgttttcagggcagtgggatatgctgactgcctaggactacatcttctctttctttctctccaggatggaagtggggatggaggtggcatcggcctcatttgaaccacatggactaagaggggctatgggagtattccccaaaggaagactgaggggcgttactagaaaatgggagaatggaagcagagtgggcaaaaccaacagatgttccctatagtaaataaaaaatttggacaattattagtgagcaagtacttataacatatatggcacatgggattgtgactcaccagtgtgttagcacaatatggtcaaaaacctctgatccaattcaacctactcatcttaacgattttatcagcatttaataagtttgttttggccatcatgtgttatagttttgtttgtggttttgacacctcattagaggtttcatcagtgtaaggagccaacctaagagctcttctcacaagtttcccaagagagaaattgcccctccaaatgtgaggagtctcactttatatagatagcatccacacttcttgcagtggaaaacaaaccttataaaatgtaatacgtttggtttcctaactttttcatgaccctggggtggtagaaggaagtgcaagttttatcacttggatttagagacaaggaaattgaaatggagagagaattgggctcacatgcaggcagcatgtctagctgcctccatcgtgtgatctgaggcaccccatgaggcctatgattactgtaaacctctaaaataaataaaaaataaaacaatctctgccactgaa

SEQ ID NO: 1559 - DNA, 1695 bp, Homo sapiens; identical to SEQ ID NO: 1558

SEQ ID NO: 1560 - DNA, 114 bp, Homo sapiens
tttttgtatttttaatagagacggggtttcaccgtgttagccaggatggtcttgatctcctgacctcgtgatccgcccgcctcagcctcccaaaatactgggattacaggcgtg

SEQ ID NO: 1561 - DNA, 114 bp, Homo sapiens
tttttggatttttaatagagacggggtttcaccgtgttagccaggatggtcttgatctcctgacctcgtgatccgcccgcctcagcctcccaaaatactgggattacaggcgtg

SEQ ID NO: 1562 - DNA, 115 bp, Homo sapiens
cacgcctgtaatcccagcactttgggaagctcaggcgggcggatcacgaggtcaggagatcgagaccatcctggctgacacggtgaaaccccgtctctactaaaaatacaaaaaa

SEQ ID NO: 1563 - DNA, 2357 bp, Homo sapiens
agtccacacagcaatctcctttcctcttcagtgagaacacctctcctttgatcaacattatttattcggcttagtttaaaattcctcttgaggagaagtttctgggactaaacatttgaaaatatttgaaataaaaaaattacctgtttttaagtgacaaaaattattaatttataagttacttaggaatgttctcaggtgcaagtaacagatgacacaaacacagcagattgaatcggcgatggtacaattttctcatgtaacataaatgcagcagctgcatttgttgggtggctcagtggccttttgggcttttccttcatggttgcaagatggcactactccaactcaagcatcatgtttgtattcaagacagaaggaaagggagacggtttgtatcagtcactctgacccttttatcagaattgcataagtgctcttagaagcagtctgcttctccctaagatctttgctcagatgttattgggcagagcttttttgtgtgtgtagtgtctaatggttgcaagggaggttgggaaaaatgattcttttttttctggcttttatagtggaagcaggcaaaagattagttgggtgtagttgttgggttagccggtcatcatgctctgcccctaagtgctcagaatactgaagactaaagatgcaatgacaaacaagatagtccttattgtttttgtttgtttgtttgttttttgtttttagatacagctataattttattacaaaactgttcttttggcattagttagttacagtgatagcaagataatgtgagtgtgcagactggctctgatggaaccactgtattccctgcttactgaaccaaacttcagctacctcatatccattacatacaagtgacctgcagttattactgctacaaatcttgacgcgtgtaccgctgagggaggagctgatgctaagggatttgattacatgttgataagactacaaaagttcgtttatgggactttttcttcctcttcccatgcaatgactttgctttagaacaatcacatggcttagagctagtctgagtagcagcagcacccaaggagcgtcagttcttgttaaaaagcaatacctgtgtgatgcatttttacgccacaggcaaagggaaggatcaccctcattttaaactcctgcagagtcccttaataaaatatcaaagcattccatcaagttcttctgggtggtgttattgctgtacatttgttggtgagtcattttctgtgctgtgtttgctttgaaaggatcttccaatttatctccaatattcctttcttatcatgtccttttctttagctaggatttcacataaccctaatgcattattaagaatgtcttccttattgacacactggttttctagcatgtcttcatagatacccacaagaaaggcaattaggtagggggaactatgacttggttgtaaatcaagtaattgatttaacagattaggatatttggaaagaccacgatcctgcaaaattcctttcaaatagttccatgaactattatgtggtactagttgaatcatttccagagtgtattggacttctctctccaatacagcacaatcattgtagccagtggtgttggaaataacaaaatatcttcggttccagacagagttatttctcacatcctctttgagaagttggtccacatactgcagctcattatcccaaagtttaaattcctgaataacccattgtcgatgctgccaggcatgataattctttgcatcctgattaagaatattatcaataaattcaggctcctgagatggatctcttagccattccactattactcgcctattgtgacaaactagatagtttttgggctgcccctcaattatttcagtgatgtagttcatttcctcatgtagatccttctgaagtgactttaagagaactctccggaaatgtcacactgtataattggctgcatttaactcaacagcatcccgggttagcttaaaacctcgttcgcttctttcttcatgctgcaggacagctcggaagtaatcaaacatctctaaatttgtcactataaatgatctggaccacgggattggggccatcattctgcggcactggatctgtatcagcccattctgttctgtccctgtacgggacataggagggcgaatccaggctcagaaacccgtcgtccatgggggacgccacggcttccccagcctctgctgccatctcttcctcgtgctgctcctggggcagcggtgggtgcggctggggcgggggctgctccagctgccggggctcaccgccttgcgcagcctccccgaccccctcggtggccgccatctc

SEQ ID NO: 1564 - DNA, 2357 bp, Homo sapiens; identical to SEQ ID NO: 1563

SEQ ID NO: 1565 - DNA, 2894 bp, Homo sapiens
aagaactgcaccaaactcaaatccctggatatcggcaaatgccctttggtatccgacacgggcctggagtgcctggccctgaactgcttcaacctcaagcggctcagcctcaagtcctgcgagagcatcaccggccagggcttgcagatcgtggccgccaactgctttgacctccagacgctgaatgtccaggactgcgaggtctccgtggaggccctgcgctttgtcaaacgccactgcaagcgctgcgtcatcgagcacaccaacccggctttcttctgaagggacagagttcatccggcgttgtattcacacaaacctgaacaaagcaaatttttttaaaagcagcgtatgtaagcaccgacacccactcaaaacagctctttcttccgggaaggttattaggaatctggcctttatttttcctcatttctcatgggcaacagaggccaaagaaacgaagcaagacaaacagccaaacaggcatttaggtcaggtcatttgtaggcagtttctcttctcacaaaagatgtacttaagcaggctgatcgctgttccttgagcaaggcgcttactctcctccgctcaggcccccaaggcctgccctttccctcgcacacaggccccacccccacagttccacgccccccccccaaggccacaccctccctccctagagcagcagcgaggatccatcatcagaatcacagtgctctccagacctcctctctaaactgcttcattgacctaagtcactctcttcaatcccacacccatggacattcttgtcaactcaataccatagcactttgcataggcaaaatacttttcaggcctttttaaaaaattcattacagcaaacagctggggaaggacatgcagtcctcccccagctctgtcaatgactatgaccttggccaaagcacttcactgctctgggctgcagcttccagcactgaatcagaggccacacagcccaaagattagcttcatgtccattatagcattgagggagcagagatacccatacacagaagcaccttggcatagagcacccaggcatcgacctcttccaggagaactgattctgtggatggatgtgatttcaggagattgtgcagtgccagcatcagtgcataaagggtcctgtatgtcctttggctgcaaatcacccacttccctgtgtttcagtgggagaatttcctctcccacctcctcacatcctcttttgccaggctggatgctgtcgtctctgtacacaaatactttctgcattcccccctccacaccatcctagcgaggcaccagcacacctaatcacagcaaagcccagatccccccatcagttgcttttactcagtgttttcaaataggagtaaaggcccttgcaatttttaattaacaagcaaggcccaagggaacacatgtcctcaaaagtttttctgatccctcgccttgcacacctggcatgcatcaggcacatctgtcctacagctggcagagacagatgcctcggttctttgtcattcagattgcatttgacctcttctcatctatttatttctttatacatccagacttcatcacatgaagcctattggggttaagtttgtaagtgtttaattgtgcaaattgccaccctgtgtacctcctccatgtctgtctgcgtgttttccaccaaagaatgcaaagcagacttccaggtgtttaaattctgttcactcaacaatgccagatgaatggaagagggaacacactgagatgacttagactctggtccaccaaccagacccttggaaaggaatactaaaatcattacaaggtatggattttaaatggatgaaacttcaaattatcttatttggatagaagtctatattctagcctcatttgcatgaagtcagatagccagaagaaattccattgctggttttcacgaaattcacttgtcttttgctaataaacacatggccctttcccagattattctctagccaagccccacctttgttacgttgaaatccctcatttattttcttctcaaaatgcccattatccaaatgcagaacctctgcatctccaagccagttatgctgaatttgtcaaacttagacacccttgacaactgcactcctactgtaggctcctgtgcatactgtcgtcttctgtgggggatggagaggttagtgtgatgaggtggtgtctgcccaggaggtttctttcaaacatcatggcctcccatccaatcaacatcatcaaattacatgtgtaatcaaggctctgtgccatgggggaaatgaatcatttagctaggccaggatctagtgaaagccacagagtttaaaaccatgaaagaagttgaaggcagcattcctcagctctgtgacttgtgaccctatttgaagtttcaggatttgggtgtcacaaaggattgtccctaatccttggccctggggtcttccgagtgagctggtttaatactctgagaatgagcagggagatccagagaatgaatccctgaccgcatcacctaaactgtcttccaaacatgagacaaagctgactgttcacactgattgcccagcacataccgtcttgccagtttcttcttttctcccagtctcctgttcatccattctgttctcccttggggtgggaatctatgatggaggttactggggaaacagctcagcagatttttggagaccaaaccaaaggtctcactaggaaatttatctgttttaaaacattgcttccttcctggctctgctaaattgaatgctcattgtttgttgttgttgttttttaattctaatgttcaaatcactgcgtgctgtatgaatctagaaagccttaatttactaccaagaaataaagcaatatgttcgtaatca

SEQ ID NO: 1566 - DNA, 3207 bp, Homo sapiens
aaaaaaactacactcagcccagcacattgatcaagtatctatctctgagcagttggccttgccagggagagcagagatgtggcaggctccttcagctggagacagggagcttctcagagaagtgagcagagactccacagacaccctaaaaaggcttctactcaagaagtaaagccactactcctgcctttttgcttagtggacaggaaggcacaggagtttgtctgggacatcatagaaattcttaggtttaacttaattctggtcattgtcttctttatttcctgtttttcttccctttgtcagtcttcgcatccaagatttcttccctccctcttgtgggccagcctgtcctgttccagagctagcctgttcctgggtagccttccttagcctccattcagcctcaggtcttttgccttcttccgtgtttatttagagagcagaatctaataacgggttccactgtagccactatccatggacttctgggtcctcttcaggtttgagtgcttgaaaatgttcattctctgggcttgtggcctgtctcctccactctcctcctcaccctctcgctccttcctgtgtgagggccgctctgcagtaatgttctcaggcaagccttcctaggcacctcagaaactactttgccagagccagtaagaatatataatattggagcagttgccaggatagaaattaaatatagattccagtttaggatagagtttttaccgagagctcttcagacagtatacctgtgtcttctctggcaattgctttcattttagtcctatataaaagctttccttttctgtttttttttaaaactatgcttttgcttgcctaaatcttttgatcttatatttctctcatctcagagcctgtcctgagttgtaaggtatttcatactgccttacttaaaagttttttaaactactagagtcatttgatacacacagaagttacctaataatccaaagatgtccatcaagggaggaagggtgggtcatcagactttgcctttgatgttgtagactaggctcctgagttaagcagcagagggacagcagtgccatgtgccttcactgtgtcccaggaaatctgggttggttccagtgggaaataccagtatttcttggttctggaaagtagcaaaagagtaggagatggggaaatagggatggggagagcaagccccgcatgtccatggcgagtcaggtggggagcacgggtggaagggccggctgttgacagacagactaagctgtgtggtgctcttgccgccccttcctgggtacagagcttgagaaaaatgcagccgaccactccctgtgtttgtacagagcaaagcccaaaagccaacctcagatctcctgatttggcagctgaagaaatcagcagagtcctgattgcctgattcagtcccaaaaatgaatgtcaggccccgccccctccccaccaacattgcctctcctacattctccttctgcccctaaatcagacaggaggccagagaggagtattgctcaatgcgtgctatgtgcaactcctcaggccttgtgccacctccatgctgagcccctgaagcagggtgtcctgggtgcctgtgtgtcagctccctcctctctacctacctctgaccttcttgtgggtgagggtggccatgcttatggccatcttaaaactggagaggcagagaactacttatgagtctgtagaccacgtgttgtcttccatggcctgtttctcctgctgtctgggtgagtgagcctgcaacgcaatgcccatgagagtaaatgcctcctgacctaccctgctcagcactgttctagtgtcttggccttgaaagaaaagcctgacttcctgctgacacatgtggtaggggcatggcagctatgaggcacctcctacgtctgttttctggctgtggtgacttgggatttttaaccttatatatctttttcctttactcaaaacaaaacaatttttagcacactgaaaaaaaaaaaaagccaaatgttttgtgcctttctaaggcagcactgtatcccaggctgcattttaggacttaatatggaaataccagagtctgagctcctctaccttgagtttcattagtccttagtgtctaggagacaggaaagaatgctctctgtgactggagaggtgacatgcaggtgcagtgtgtctggagtccctttcccctgctgtgagacttcagtggaggagagaagcattgtaccctgggatcatttggttggttccaatcacaagcttagttatcaggttgcatgccttgtctcctgcaaaagacagaatgtttcacaattcccaggtaaactctggaccattccaagtgtcctagccttctgatgacattaattacctagttgtgtggaggagtataggatggactcctgagaaggggaggttggtggctttgtcttttctttttgctggatcctgaactggtctagacctcctgcccccaccccccagcccccatcagatgtggctggcctttcatttgaaggcttcagacttaaagcattaagcagctagtgccctctgcagggcctggtttccccagggaagggcagcaaggaacatgggaccagaagcctgtcctcagtaatgtgactatagtgagctttagcaaaagtttttctatataatgacatcttacttatcttttaccctttcctcagttttcccctgcctttaactaataaagaattgggagacagaaattttaaagtcctccttattcaagattttgaaattcttagcctgggagtgctggagagaacctggtgctttctccagaatgaagagtcccaatttgtatatcagtgttaagaagaaaacaaaacaaacacataggtgagattttcgtggactattttaaaaatgtgtcattaatataaaaaatttatattagcagtatttaatcattctcacctgtaaagaataagaaaaacagaaggtaaatattcttacagagaatagcagagctttaagattcattttcattttaagtccattttattttgccagtgtattaatgtttagaagtctgttttactaatgttatttattaattttttttcatttccatacacagttagttaactaaagagctttttcaagcacccatgtctgtaaaaaaatatttttaaataaagtttcttttgttgtagcaga

SEQ ID NO: 1567 - DNA, 3206 bp, Homo sapiens
aaaaaaactacactcagcccagcacattgatcaagtatctatctctgagcagttggccttgccagggagagcagagatgtggcaggctccttcagctggagacagggagcttctcagagaagtgagcagagactccacagacaccctaaaaaggcttctactcaagaagtaaagccactactcctgcctttttgcttagtggacaggaaggcacaggagtttgtctgggacatcatagaaattcttaggtttaacttaattctggtcattgtcttctttatttcctgtttttcttccctttgtcagtcttcgcatccaagatttcttccctccctcttgtgggccagcctgtcctgttccagagctagcctgttcctgggtagccttccttagcctccattcagcctcaggtcttttgccttcttccgtgtttatttagagagcagaatctaataacgggttccactgtagccactatccatggacttctgggtcctcttcaggtttgagtgcttgaaaatgttcattctctgggcttgtggcctgtctcctccactctcctcctcaccctctcgctccttcctgtgtgagggccgctctgcagtaatgttctcaggcaagccttcctaggcacctcagaaactactttgccagagccagtaagaatatataatattggagcagttgccaggatagaaattaaatatagattccagtttaggatagagtttttaccgagagctcttcagacagtatacctgtgtcttctctggcaattgctttcattttagtcctatataaaagctttccttttctgtttttttttaaaactatgcttttgcttgcctaaatcttttgatcttatatttctctcatctcagagcctgtcctgagttgtaaggtatttcatactgccttacttaaaagttttttaaactactagagtcatttgatacacacagaagttacctaataatccaaagatgtccatcaagggaggaagggtgggtcatcagactttgcctttgatgttgtagactaggctcctgagttaagcagcagagggacagcagtgccatgtgccttcactgtgtcccaggaaatctgggttggttccagtgggaaataccagtatttcttggttctggaaagtagcaaaagagtaggagatggggaaatagggatggggagagcaagccccgcatgtccatggcgagtcaggtggggagcacgggtggaagggccggctgttgacagacagactaagctgtgtggtgctcttgccgccccttcctgggtacagagcttgagaaaaatgcagccgaccactccctgtgtttgtacagagcaaagcccaaaagccaacctcagatctcctgatttggcagctgaagaaatcagcagagtcctgattgcctgattcagtcccaaaaatgaatgtcaggccccgccccctccccaccaacattgcctctcctacattctccttctgcccctaaatcagacaggaggccagagaggagtattgctcaatgcgtgctatgtgcaactcctcaggccttgtgccacctccatgctgagccctgaagcagggtgtcctgggtgcctgtgtgtcagctccctcctctctacctacctctgaccttcttgtgggtgagggtggccatgcttatggccatcttaaaactggagaggcagagaactacttatgagtctgtagaccacgtgttgtcttccatggcctgtttctcctgctgtctgggtgagtgagcctgcaacgcaatgcccatgagagtaaatgcctcctgacctaccctgctcagcactgttctagtgtcttggccttgaaagaaaagcctgacttcctgctgacacatgtggtaggggcatggcagctatgaggcacctcctacgtctgttttctggctgtggtgacttgggatttttaaccttatatatctttttcctttactcaaaacaaaacaatttttagcacactgaaaaaaaaaaaaagccaaatgttttgtgcctttctaaggcagcactgtatcccaggctgcattttaggacttaatatggaaataccagagtctgagctcctctaccttgagtttcattagtccttagtgtctaggagacaggaaagaatgctctctgtgactggagaggtgacatgcaggtgcagtgtgtctggagtccctttcccctgctgtgagacttcagtggaggagagaagcattgtaccctgggatcatttggttggttccaatcacaagcttagttatcaggttgcatgccttgtctcctgcaaaagacagaatgtttcacaattcccaggtaaactctggaccattccaagtgtcctagccttctgatgacattaattacctagttgtgtggaggagtataggatggactcctgagaaggggaggttggtggctttgtcttttctttttgctggatcctgaactggtctagacctcctgcccccaccccccagcccccatcagatgtggctggcctttcatttgaaggcttcagacttaaagcattaagcagctagtgccctctgcagggcctggtttccccagggaagggcagcaaggaacatgggaccagaagcctgtcctcagtaatgtgactatagtgagctttagcaaaagtttttctatataatgacatcttacttatcttttaccctttcctcagttttcccctgcctttaactaataaagaattgggagacagaaattttaaagtcctccttattcaagattttgaaattcttagcctgggagtgctggagagaacctggtgctttctccagaatgaagagtcccaatttgtatatcagtgttaagaagaaaacaaaacaaacacataggtgagattttcgtggactattttaaaaatgtgtcattaatataaaaaatttatattagcagtatttaatcattctcacctgtaaagaataagaaaaacagaaggtaaatattcttacagagaatagcagagctttaagattcattttcattttaagtccattttattttgccagtgtattaatgtttagaagtctgttttactaatgttatttattaattttttttcatttccatacacagttagttaactaaagagctttttcaagcacccatgtctgtaaaaaaatatttttaaataaagtttcttttgttgtagcaga

SEQ ID NO: 1568 - DNA, 3207 bp, Homo sapiens
aaaaaaactacactcagcccagcacattgatcaagtatctatctctgagcagttggccttgccagggagagcagagatgtggcaggctccttcagctggagacagggagcttctcagagaagtgagcagagactccacagacaccctaaaaaggcttctactcaagaagtaaagccactactcctgcctttttgcttagtggacaggaaggcacaggagtttgtctgggacatcatagaaattcttaggtttaacttaattctggtcattgtcttctttatttcctgtttttcttccctttgtcagtcttcgcatccaagatttcttccctccctcttgtgggccagcctgtcctgttccagagctagcctgttcctgggtagccttccttagcctccattcagcctcaggtcttttgccttcttccgtgtttatttagagagcagaatctaataacgggttccactgtagccactatccatggacttctgggtcctcttcaggtttgagtgcttgaaaatgttcattctctgggcttgtggcctgtctcctccactctcctcctcaccctctcgctccttcctgtgtgagggccgctctgcagtaatgttctcaggcaagccttcctaggcacctcagaaactactttgccagagccagtaagaatatataatattggagcagttgccaggatagaaattaaatatagattccagtttaggatagagtttttaccgagagctcttcagacagtatacctgtgtcttctctggcaattgctttcattttagtcctatataaaagctttccttttctgtttttttttaaaactatgcttttgcttgcctaaatcttttgatcttatatttctctcatctcagagcctgtcctgagttgtaaggtatttcatactgccttacttaaaagttttttaaactactagagtcatttgatacacacagaagttacctaataatccaaagatgtccatcaagggaggaagggtgggtcatcagactttgcctttgatgttgtagactaggctcctgagttaagcagcagagggacagcagtgccatgtgccttcactgtgtcccaggaaatctgggttggttccagtgggaaataccagtatttcttggttctggaaagtagcaaaagagtaggagatggggaaatagggatggggagagcaagccccgcatgtccatggcgagtcaggtggggagcacgggtggaagggccggctgttgacagacagactaagctgtgtggtgctcttgccgccccttcctgggtacagagcttgagaaaaatgcagccgaccactccctgtgtttgtacagagcaaagcccaaaagccaacctcagatctcctgatttggcagctgaagaaatcagcagagtcctgattgcctgattcagtcccaaaaatgaatgtcaggccccgccccctccccaccaacattgcctctcctacattctccttctgcccctaaatcagacaggaggccagagaggagtattgctcaatgcgtgctatgtgcaactcctcaggccttgtgccacctccatgctgagccctgaagcagggtgtcctgggtgcctgtgtgtcagctccctcctctctacctacctctgaccttcttgtgggtgagggtggccctcgcttatggccatcttaaaactggagaggcagagaactacttatgagtctgtagaacacgtgttgtcttccatggcctgtttctcctgctgtctgggtgagtgagcctgcaacgcaatgcccatgagagtaaatgcctcctgacctaccctggtcagcactgttctagtgtcttggccttgaaagaaaagcctgacttcctgctgacacatgtggtaggggcatggcagctatgaggcacctcctacgtctgttttctggctgtggtgacttgggatttttaaccttatatatctttttcctttactcaaaacaaaacaatttttagcacactgaaaaaaaaaaaaagccaaatgttttgtgcctttctaaggcagcactgtatcccaggctgcattttaggacttaatatggaaataccagagtctgagctcctctaccttgagtttcattagtccttagtgtctaggagacaggaaagaatgctctctgtgactggagaggtgacatgcaggtgcagtgtgtctggagtccctttcccctgctgtgagacttcagtggaggagagaagcattgtaccctgggatcatttggttggttccaatcacaagcttagttatcaggttgcatgccttgtctcctgcaaaagacagaatgtttcacaattcccaggtaaactctggaccattccaagtgtcctagccttctgatgacattaattacctagttgtgtggaggagtataggatggactcctgagaaggggaggttggtggctttgtcttttctttttgctggatcctgaactggtctagacctcctgcccccaccccccagcccccatcagatgtggctggcctttcatttgaaggcttcagacttaaagcattaagcagctagtgccctctgcagggcctggtttccccagggaagggcagcaaggaacatgggaccagaagcctgtcctcagtaatgtgactatagtgagctttagcaaaagtttttctatataatgacatcttacttatcttttaccctttcctcagttttcccctgcctttaactaataaagaattgggagacagaaattttaaagtcctccttattcaagattttgaaattcttagcctgggagtgctggagagaacctggtgctttctccagaatgaagagtcccaatttgtatatcagtgttaagaagaaaacaaaacaaacacataggtgagattttcgtggactattttaaaaatgtgtcattaatataaaaaatttatattagcagtatttaatcattctcacctgtaaagaataagaaaaacagaaggtaaatattcttacagagaatagcagagctttaagattcattttcattttaagtccattttattttgccagtgtattaatgtttagaagtctgttttactaatgttatttattaattttttttcatttccatacacagttagttaactaaagagctttttcaagcacccatgtctgtaaaaaaatatttttaaataaagtttcttttgttgtagcaga

SEQ ID NO: 1569 - DNA, 863 bp, Homo sapiens
aactccatcagtcccctaattgtcagcctttacctccctcccagagcaaggagtttagggattctaaagcttagtgtccacacatcattctaccagaccttagagctttagaagctcaatctaaaatactgtaactcagcataaactattactatcactcctttgaactcagtctccatgagcagtgttttgttggaaatacatagaacggcttaatgcctagagggtggtggatagtgaaggacggtcaaggttatatttttgactgcttagggattctttggatacaagaaacagaaatgttcaagcggaataaaggagggagtggagttgtggtaaggatgcagggtatttcgcagaacccaggacgggaagtgcctttggttcttgggtggagctggaactgcagagctttgcacctagtcctttctcccgcttcacagtctgcttatggtatatgtggcccccaaataggcactctagtcctcaagtctacaccaccttccaactctggggatcaccatgaacaaattctcaatttcccatacttaattttttttttttttgagatggagtctcgctgtgtcgcccaggctggagtgcagtggtgcagtctcaactcaccacaacctccgcctcccaggttcaagcagttctctgcctcaacctcccgagtagctgggattacaggcgcctgccaccatgcccagctaatgttcatatttttagtagagacagggtttcaccgtcttggctaggctggtcttgaactcctgaccctcatgatccacccacctcggcctcccaaagtgctaagattacaggcgtgagccaccgcgcccggcccatacttcgtattctta

SEQ ID NO: 1570 - DNA, 4428 bp, Homo sapiens
caatgtatgatttctgggacaattaagctttatttttcatatatatatatattttcatatatatatatacatacatatataaaggaaacaatttgcaaatttacacacctgacaaaaccatatatacacacatatgtatgcatacacacagacagacacacacacccgaagctctagccaggcccgttttccatccctaagtaccattctctcatttgggcccttctagggttggggccctgagcttggtttgtagaagtttggtgctaatataaccatagctttaatccccatgaaggacagtgtagacctcatctttgtctgctccccgctgcctttcagttttacgtgatccatcaagagggctatgggagccaagtgaacacggcggattgaggctaattcacctgaactcaaaaacagtgcccagcttcctcaccgcaggcacgcatcttttctttttttttcctcgagacggagtctcgctgtgttgcccaggctggagtgcagtggcacggtctcggctcactgcaagctccacctcctggattcataccattctcctgcttcagccttccgagtagctagggactataggtgccaaccactacgcctagctaattatatattgtatattagtagagacagggtttcaccgtgttagccaggatggtctcgtcctgactattgtgatccgcccgcctcggcctcccaaagtgctgggataacaggcgtagagccaccacacctggccccggcacgtatctttcaaggaatagacaccagttcctggcttctgaccaaagaaaaaatgtcacaggagactttgaagaggcagacaggagggtggtggcagcaacactgcagctgcttctggatgctgctggggtgctctccggagcgggtgtgaacagcgcacttcaacatgagcaggcgcctggctccggtgtgtcctcacttcagtggtgcacctggatggtggaagccagcctttggggcaggaaaccagctcagagaggctacccagctcagctgctggcaggagccaggtatttacagccataatgtgtgtaagaaaaaacacgttcttacaagaaactctcctacccgctcgggagactggggctccttgcttgggatgagcttcactcaacgtggagatggtggtggactggtccctgaaaagcgggccttgcaggccaaagtgaggtcctcaggtcctaacccagtggccctctgaaagggggtgtgcaggcgaggggagcaggaggcttctctctagtccctttggaggctttggctgagagaagagtgagcagggagctgggaatggtccaggcagggaagggagctgaagtgattcggggctaatgcctcagatcgatgtatttctctccctaaaagtgggtagaggagaagaggggaacacggagacggtgctgagttgaaggtgtgagcaccgagaggaaggagagatggaagcagaagccgatgaatttggtgggcagcgttggggaggaagctaggatgggcatggcaggccagggaaggagggcggcccccgtctgactgcactggtgaaatggccacacccagagccacgggcattggtcaggaaaaggtgatgggacagggtctttctcagtcttcctccaagctccctcagccacttgcttggccctgccatctgtgagtagtgttaagaaggcaagatggggcctgctccctatctctgacaaagagggatgaaggatagagagaaccgttagtccctactgcccccggtccctgaggatgtggcaggctctggccacaggaaccgcctcctacctggtctcccggagccctcttgtcaccgctgctgccctgcaggaggcccatctcttctgggagcttatctgacttaacttcaactacaagttcgctcttacgagacgggggcagcgtgctgggaggagggagggaggtgagaggttggtatctcagggccacaggaagagaagggcccgctgtgaaggatgtggaatggatgagggctccttgctccagggccagcccagggcagggaagcaggtcatgagaccatgtggctgatggaagctgggcagtgggtagtggagcaggcagcaccctgacccagggccccactcctgctgtcaaggggcaggcgggcgctgggcaggcagcaggctgggtggcaaaacgggcgggggcggaggggccggtgttgggcttacatctcctgcttccctgagcgcctgcacggcagcttgcccttcttatagaggaaatagaggacagcgcccagcaccgccaggaccaggatgcacacaatcacagccacgatgaccacgcccccggctctccggctccggcagctttctctctgcgccacaaagacactcctcgtcactccctgccccaggccacttcgtcaccatcgttgccccagccagtccagggccgacaagatggggctgctactcacctttctggacagggctctctggggagggacagggcagaaaggatgccctggcacagccctgttctcttgccaggcctggcttacctgtggaggtgctgttggctctggtatgaggactggcagtggaagtgctgaggccagtggttgtgttggagtctggtgtgagggtggttaaattgactaggaggcagagggaggggtgttaggagaagcgcaagttactgcccgtgcctgggcctgcccctgccatcccctgcagggatgcagccctcacccagctccaggaagaggatgctggtgtttttgcccaggtcgttggaggccgtgcattcaacacctgtctccaacagctccggggtcacgaggacattcagggtgctcaggactcgctgtggatcttggtcttgttcacttgcctgcgaggaaaggaaggaggcagctcaggggatggggaggatctctggtcctggccacaaagcgcaggcagggattaggagagtgtggcagatgagacacccgctcaccgtgccgttgacgttccaggagatggtgggccgggggtgccctgacgcttcacaagacagattcaacaccatattctctttcacccacaccttcctctccttgaatgccatccaaggggggccttggggaggtagggagaggtgaggtggcaagcccagctagcctgcctccccctccgcaccagagctccccagggcagcaggtggctttttgtcaaagagcttaaaaaccaccccacttggggtgacctggtctctaccccagagggagggcctcaccaaaaatggccacgttgaccagctgtgtgcggttcaggccgggtatgctgggcacagacgccacgcagcgatagccgcctcctgcctcccgtttcaggtcatgcaactgaagcacaggccccctttccagcacctggcctgtctgggatgagagatgggtcagagggtctgggaaagagcacattcttgtcacccgccagccccacccaccccatcagccccttgccccagacccgcctgggtacctcttctctcagcctctggaactcgagctcctggctactctctgctcacaggtcaggtgaggctgctgccttcctgtctctcaggggctgcgggactcactcggacgtcagacacatctgggggtacagcaatcatgtcacccagggcagggtggggccagttccctattgccccagcctggtccccctgtcctgggtccccagcccctcacagttcaccagtagttcctgtggttcactcagcagcgatatcatggtgtccaagtccaggccctgacattcatagcgcccactgtgttccttccgggcaggctccagcaccaggaccccgttgtcgttggttgtctcttcctctgcctccctggtgctggggttctagggaggattggggaggtgagcagagtgcacctcccgccactccacctgggtctctgcttgcatccccacctgcacccagcacaaagcccccacacctgcttgctgatgctgaagtgtggtggagggttgccatcagccaaacacctgatttccacgcggtccccttccttcagcattcccacgggctccacttccagccacactttttctgtcgggtctgcataggcaaagggggtagctcttggcccatgagtcaacctgggctgataagggggagccagcaggagtttccagcagccccagccccagtaagcagagagtcaggttagtactcacagaaaacagggacggtgacttccctggactccttcatgtggttcccactgggcagccggtagttgagctcacagtaaaactgggcatctttgtcttctttaaccagctgtgccttcagaatactctgcaaggtgtacaaaccactcgactccacagtctgggacgactgaatgtggac

SEQ ID NO: 1571 - DNA, 863 bp, Homo sapiens; identical to SEQ ID NO: 1569

SEQ ID NO: 1572 - DNA, 3439 bp, Homo sapiens
caatgtatgatttctgggacaattaagctttatttttcatatatatatatattttcatatatatatatacatacatatataaaggaaacaatttgcaaatttacacacctgacaaaaccatatatacacacatatgtatgcatacacacagacagacacacacacccgaagctctagccaggcccgttttccatccctaagtaccattctctcatttgggcccttctagggttggggccctgagcttggtttgtagaagtttggtgctaatataaccatagctttaatccccatgaaggacagtgtagacctcatctttgtctgctccccgctgcctttcagttttacgtgatccatcaagagggctatgggagccaagtgaacacggcggattgaggctaattcacctgaactcaaaaacagtgcccagcttcctcaccgcaggcacgcatcttttctttttttttcctcgagacggagtctcgctgtgttgcccaggctggagtgcagtggcacggtctcggctcactgcaagctccacctcctggattcataccattctcctgcttcagccttccgagtagctgggactataggtgccaaccactacgcctagctaatttttttttgtatttttagtagagacagggtttcaccgtgttagccaggatggtctcgtcctgactttgtgatccgcccgcctcggcctcccaaagtgctgggattacaggcgtgagccaccacacctggccccggcacgtatcttttaaggaatgacaccagttcctggcttctgaccaaagaaaaaatgtcacaggagactttgaagaggcagacaggagggtggtggcagcaacactgcagctgcttctggatgctgctggggtgctctccggagcgggtgtgaacagcgcacttcaacatgagcaggcgcctggctccggtgtgtcctcacttcagtggtgcacctggatggtggaagccagcctttggggcaggaaaccagctcagagaggctacccagctcagctgctggcaggagccaggtatttacagccataatgtgtgtaaagaaaaaacacgttctacaagaaactctcctacccgctcgggagactggggctccttgcttgggatgagcttcactcaacgtggagatggtggtggactggtacctgaaaagcgggccttgcagggccaagtgaggtcctcaggtcctaacccagtggccctctgaaagggggtgtgcaggcgaggggagcaggaggcttctctctagtccctttggaggctttggctgagagaagagtgagcagggagctgggaatggtccaggcaggaagggagctgaagtgattcggggctaatgcctcagatcgatgtatttctctccctaaaagtgggtagaggagaagaggggaacacggagacggtgctgagttgaaggtgtgagcaccgagaggaaggagagatggaagcagaagccgatgaatttggtgggcagcgttggggaggaagctaggatgggcatggcaggccagggaaggagggcggcccccgtctgactgcactggtgaaatggccacacccagagccacgggcattggtcaggaaaaggtgatgggacagggtctttctcagtcttcctccaagctccctcagccacttgcttggccctgccatctgtgagtagtgttaagaaggcaagatggggcctgctccctatctctgacaaagagggatgaaggatagagagaaccgttagtccctactgcccccggtccctgaggatgtggcaggctctggccacaggaaccgcctcctacctggtctcccggagccctcttgtcaccgctgctgccctgcaggaggcccatctcttctgggagcttatctgacttaacttcaactacaagttcgctcttacgagacgggggcagcgtgctgggaggagggagggaggtgagaggttggtatctcagggccacaggaagagaagggcccgctgtgaaggatgtggaatggatgagggctccttgctccagggccagcccagggcagggaagcaggtcatgagaccatgtggctgatggaagctgggcagtgggtagtggagcaggcagcaccctgacccagggccccactcctgctgtcaaggggcaggcgggcgctgggcaggcagcaggctgggtggcaaaacgggcgggggcggaggggccggtgttgggcttacatctcctgcttccctgagcgcctgcacggcagcttgcccttcttatagaggaaatagaggacagcgcccagcaccgccaggaccaggatgcacacaatcacagccacgatgaccacgccccggctctccggctccggcagctttctctctgcgccacaaagacactcctcgtcactccctgccccaggccacttcgtcaccatcgttgccccagccagtccagggccgacaagatggggctgctactcacctttctggacagggctctctggggagggacagggcagaaaggatgccctggcacagccctgttctcttgccaggcctggcttacctgtggaggtgctgttggctctggtatgaggactggcagtggaagtgctgaggccagtggttgtgttggagtctggtgtgagggtggttaaattgactaggaggcagagggaggggtgttaggagaagcgcaagttactgcccgtgcctgggcctgcccctgccatcccctgcagggatgcagccctcacccagctccaggaagaggatgctggtgtttttgcccaggtcgttggaggccgtgcattcaacacctgtctccaacagctccggggtcacgaggacattcagggtgctcaggactcgctgtggatcttggtcttgttcacttgcctgcgaggaaaggaaggaggcagctcaggggatggggaggatctctggtcctggccacaaagcgcaggcagggattaggagagtgtggcagatgagacacccgctcaccgtgccgttgacgttccaggagatggtgggccgggggtgccctgacgcttcacaagacagattcaacaccatattctctttcacccacaccttcctctccttgaatgccatccaaggggggccttggggaggtagggagaggtgaggtggcaagcccagctagcctgcctccccctccgcaccagagctccccagggcagcaggtggctttttgtcaaagagcttaaaaaccaccccacttggggtgacctggtctctacccagagggagggcctcaccaaaaatggccacgttgaccagctgtgtgcggttcaggccgggtatgctgggcacagacgccacgcagcgatagccgcctcctgcctcccgtttcaggtcatgcaactgaagcacaggccccctttccagcacctggcctgtctgggatgagag

SEQ ID NO: 1573 - DNA, 2668 bp, Homo sapiens
caatgtatgatttctgggacaattaagctttatttttcatatatatatatattttcatatatatatatacatacatatataaaggaaacaatttgcaaatttacacacctgacaaaaccatatatacacacatatgtatgcatacacacagacagacacacacacccgaagctctagccaggcccgttttccatccctaagtaccattctctcatttgggcccttctagggttggggccctgagcttggtttgtagaagtttggtgctaatataaccatagctttaatccccatgaaggacagtgtagacctcatctttgtctgctccccgctgcctttcagttttacgtgatccatcaagagggctatgggagccaagtgaacacggcggattgaggctaattcacctgaactcaaaaacagtgcccagcttcctcaccgcaggcacgcatcttttctttttttttcctcgagacggagtctcgctgtgttgcccaggctggagtgcagtggcacggtctcggctcactgcaagctccacctcctggattcataccattctcctgcttcagccttccgagtagctgggactataggtgccaaccactacgcctagctaatttttttttgtatttttagtagagacagggtttcaccgtgttagccaggatggtctcgtcctgactttgtgatccgcccgcctcggcctcccaaagtgctgggattacaggcgtgagccaccacacctggccccggcacgtatcttttaaggaatgacaccagttcctggcttctgaccaaagaaaaaatgtcacaggagactttgaagaggcagacaggagggtggtggcagcaacactgcagctgcttctggatgctgctggggtgctctccggagcgggtgtgaacagcgcacttcaacatgagcaggcgcctggctccggtgtgtcctcacttcagtggtgcacctggatggtggaagccagcctttggggcaggaaaccagctcagagaggctacccagctcagctgctggcaggagccaggtatttacagccataatgtgtgtaaagaaaaaacacgttctacaagaaactctcctacccgctcgggagactggggctccttgcttgggatgagcttcactcaacgtggagatggtggtggactggtccctgaaaagcgggccttgcagggccaagtgaggtcctcaggtcctaacccagtggccctctgaaagggggtgtgcaggcgaggggagcaggaggcttctctctagtccctttggaggctttggctgagagaagagtgagcagggagctgggaatggtccaggcagggaagggagctgaagtgattcggggctaatgcctcagatcgatgtatttctctccctaaaagtgggtagaggagaagaggggaacacggagacggtgctgagttgaaggtgtgagcaccgagaggaaggagagatggaagcagaagccgatgaatttggtgggcagcgttggggaggaagctaggatgggcatggcaggccagggaaggagggcggcccccgtctgactgcactggtgaaatggccacacccagagccacgggcattggtcaggaaaaggtgatgggacagggtctttctcagtcttcctccaagctccctcagccacttgcttggccctgccatctgtgagtagtgttaagaaggcaagatggggcctgctccctatctctgacaaagagggatgaaggatagagagaaccgttagtccctactgcccccggtccctgaggatgtggcaggctctggccacaggaaccgcctcctacctggtctcccggagccctcttgtcaccgctgctgccctgcaggaggcccatctcttctgggagcttatctgacttaacttcaactacaagttcgctcttacgagacgggggcagcgtgctgggaggagggagggaggtgagaggttggtatctcagggccacaggaagagaagggcccgctgtgaaggatgtggaatggatgagggctccttgctccagggccagcccagggcagggaagcaggtcatgagaccatgtggctgatggaagctgggcagtgggtagtggagcaggcagcaccctgacccagggccccactcctgctgtcaaggggcaggcgggcgctgggcaggcagcaggctgggtggcaaaacgggcgggggcggaggggccggtgttgggcttacatctcctgcttccctgagcgcctgcacggcagcttgcccttcttatagaggaaatagaggacagcgcccagcaccgccaggaccaggatgcacacaatcacagccacgatgaccacgccccggctctccggctccggcagctttctctctgcgccacaaagacactcctcgtcactccctgccccaggccacttcgtcaccatcgttgccccagccagtccagggccgacaagatggggctgctactcacctttctggacagggctctctggggagggacagggcagaaaggatgccctggcacagccctgttctcttgccaggcctggcttacctgtggaggtgctgttggctctggtatgaggactggcagtggaagtgctgaggccagtggttgtgttggagtctggtgtgagggtggttaaattgactag

SEQ ID NO: 1574 - DNA, 863 bp, Homo sapiens; identical to SEQ ID NO: 1569

SEQ ID NO: 1575 - DNA, 9151 bp, Homo sapiens
ttccggctctttctcctgcagcaagacttttatttaggtgtcgggactgctctgccacagctgcccacctggggcgcgtccctgctggccgccccgtcacggcccgaaccagctggggatgccgccccgccgcgggtcgctgctctgccacagctgcccacctggggcgcgtccctgctggccaccccgtcacagcccgaaccagctggggacgccgccccgccgcgggtcgctgctctgcctctgctgcctctcctcctcgagcatgctgtagaggtcgtcggcagtgctgccttcagggctctcgtctttctcgggaaacagatctgggaacgtgaaggtctgtccatgggcctaagggggagaacaaaggctccagccagagctgcaaagactcctcagcagaggggtctgtgggggagcctcatgctttctggcagcccctttctgccggcgccggattcaactgctcagaggtacctccctgggcctcctggggcagcgtccctgcctggaatgtaagcacccccacggccaccggcccccggctgtcacgctgcagcagaggccacagctccaggacagggccgctttccccaccattgtctctttagggcctggtgtctgcccccgccctgggtgcacccatttactagcacggggccacctggttggtggggggcagaaacaaggcatggaaaaacatgacacaaatcacgtctggtaccatgctgaacctgtccatccaaaatgcctcaggctctactcacattaaagctccccctcctcccagcccagagcctggcaattaaagtgaacatcacgtacgaagaaacatgcacgtgcggcagctgataaatcaggaccggctctgccaattaactggtcttacatcttctgctgagagttcagaatatgtccgtgtcagccaagccccagcccaggccacagcatgtggctcgggttcacgagaaggaggggatactgctccttggggacctaagcaaatacaagaagccatcttaacttgctaatgattactaagtgctccaaagctaagaggcagaaagagcagaccagaggagagggaagagaagagggaggaggagtgaggatggcacccgaatctggaaccctttagtgagtaaaatcagtcaggtacacttggctcttgcagaccctttgtgtgtaaataaatctggatgtgggcaggcagccaagtatgatctgaaacaggcccagatcccaccctgcgagggaggtgtatgcaccctgatccctggcgcagagcgcaggggctggcggggagagtggcactgcgtgcgccgtagccggcctgcaggaggattgccttacacagctctgaactttgcgtcttttaaaataccaaggggcagtcgtttacacgtgaggctgactgcccagaatgggagattcaccttgactatatggaggtgattctgctagttttccgaggcaaggggaacccaaaatgacagtttaaagcacaaacatggccatttgtcacagcttcgggaagaaatggggaaaggtgctgagagaaaatccgtttcttacaggagacaaacaccgtttggggatgccaagcatggtttcccaggggcttcccctttctagaagagttcaccttgtacctaaaaaaaaaaagcccttgatccttccaaaaaggagagagacagctgatcggggtaaagaacaggaatggagaaaaatgtcccaatgacaagtaaacaaggcagccctgccttcaggaatcccagggcgccctgggggctgccgcctgcctggacctggaggccggagccccgagcacggagctcggcccagctggcggcagcggtttgttctggagttgcctctcatgtcgtgcgcccttcattcctgcgcgcccttcattcctgcgctgctcagcatccacacaagcctcggggcagcgggcagtcaatggtctttttgttgtgtgggtcactgaggcgctgctttcagctcccaggactttgggccaaggagatgcttatcaggttgtcggagaaagaaatgtgggactcccgccacgtgggacagggcctttccacagcggccaactccaaataacgtggataattttatctttccaatgctccctccctgggctttgcaattagcagtgattctaagccctggcgcagggcccagggggacacgctgagcaaggtctcagcagacacgagacaggaaagggccttgagagtcccctctgcgggcagacagggaccaacggccacggcccatttctaggctgtgcaaagatgtgctggagttcaggaaggggggtgaggacccgttacaaattttcattctggaacaggaggatccatgcccaactgggacccttcaggctcccagttgccctgccctgtctctggctgcctggacttcacagagggagaacaacacgcgggcggcagctgcagacaccggatcccggagctgctgggttcagttttcatgggaggtggggcccagaggaagaacgcaagggctcggatgacttgaatgccacttgtaaccgtagctgcctctgaagtgcccgtggcggtgccggcacacgggatgtccacccacatgccatgacaaagacagatgggcccgactgacactgagcacacagaggcctttatgaggccaacggctgctctccccacctggattggctgatttcatgcacagcaaatatcaggccaaattattccgggggcccctgtttagaacaacaaatgtgactgtttttcagaaaagctgccatgctaacttggcctttttcacaaactgcctccttagccccacaacaggccggctggcccaggaggcggtttccaccatcgtgtgactgccatctagtggcagggcccgccggctcggcctccagggaccatttacaccggaacacaaccccatccccacccagtaaggccagccccaggggcagagtggggaggcccaggaggtggccggggcaggctgtggacatcttggcccagagagaaagtgcctctgggtttgcctgggactcaaaatgaagagcccaaagaaaggctttgaaactgtgggtctcactcctgacaagtctgggtttcagaaactgaaggcccaggcaacgtggggtgagggttcttcctccccagagccccccaggatacgtaagaaagcacctgctcagaagcagcctgctgagccctaacaagtacgtgggacctgctaccctgcaatgcaggacatgggcctcagccaacagcctggccagccagacctgccttggcaccaaagacctttgccctcaggggcctcacactctgcctccgaggctgaaacccagccaaggacaggctctccagaggccggggcctcccatgctctgacaccctggtgtgcgttggagttgaaacccactaggcctgtgatggctgcctttgcccacagagaattcaaacttcaaaatcacaaaacggccggacgctgagacgtgccccatgtgccccagtgctcacgtgctcccagcgccaccactaacacccccaaggccgtgacggagcatgaccttatgtggagcctgcctctgcgctgaggccctgagatccggcctcacgggggctccctgggccccagcgcagcgtctccggcacaaacatccccaaggacacagttgcgaggagcccctcggaggccccgctggggctggccagctcacacgcaccagctgcacgtaggcgaccttgtagtccggcttcttgatcctcacgtttctgtgatctcttctcttgttagagcctgccggaagggagtgaaaaaaaaatcagaactttaaaaaaatcagaactttaaaaaattacatcctcagaggtcaatgccactaaaacgaacctctgctctcttaaaaatgtaaatatgtttttaaaaactcaaaaaggcgatttctcagggaaatgggcactgtaatcaaacgagccagcacagcaggctcccaggctcctcccttctcccaacagaggccagcaggttctcaacaaaggagcggacgtggcaccagccagggcacacgacaggggcttatggaacagacagcgctttgctccccagcctcagccactgcagtcccacctcgggggctgacggcaggagtcagggctcagaatggaccccgggccagcccagttgaattccaatccctgctctggcacgtaagcaccgtgtgaccctgacaagtcaccctgtgcctcagtttcccatgagccacgtcagaccaagacccccatgcagtagctgaggctgtggctcggcgaggtgggcatgtggcacagatgggcacgacaccaacaggagaacctcccatgggcactcaccatgctgcacccgtgtccgcacagcagccacgggcacgttatagatgccctcgaggtaattcctgaggtccacccttgtcattctggaggcgaaggagaaagaaaacggcatcttaaccaggctaaaagccaaaaatactgtcccagatgcacaagcacccgaggctgagaggccgacagaccaagacccacagggggcagggaggagggctgggtacatcagcggcactagtggggccaggcagccccagcaacaccagtgctgctggctgcaagactccctactctgggcacaccagcatggggtggcagtggcacagaccccacagagtgggagcactgcccaaccaacccctggcctgctccacagccccacatggctccctgctccgggcaagtgcctgtgagaggaggtgacagtctctgcacgctcctggctggcaggtgccccacctcgtctgccccggggcccagtggccgcatcagggttaggcctgctctgcggctgatgggactgatgaggttctaggaagtaccttctggaaaggcctgcctggcattcggtgcgttaactgcaagttccctctactgcagaacctcacggtcactgtcaactcagcttctgggcccctgcaggctgcacaggcctgaccttcgcccccaggggagctcacgctgctgccccgcctggctcgcgtcaaccctgagctggggacctgtgaacttaaacactgcagagcagcaccccagttttgctcgtagggactgtgcatttctctgaaggtcaagcaggctcttctgagcggttctgtacatcacggcctgctcccaacccagcctctcagggcgcctctcctaaaaagaagctgcaagaactcaacagaagacgcgagcacagaggtccaaattttaaggcttccagtgaagccgtccccgggtggagggcggcgtgcagcctgcctgccgggctccacacctacagggactccatcaatacttgccgggcagggccgcctgaggtgccttcccagcaggaagaggctagcacgtgagcagagttgttttaactcaggacccaggcccccctgagggcactctcccaacccagcgggaaaacttccgggctcactccacggggatccccccgagggtgctccccaaccccagccggaatcctcccggactcactccatggggatccggaactgcacggtgtcctcgggctgggccacaccgggccgcaccagctgaatgaagaagttggttcggaacacccgaagttgtgggccacccagccggtacagggggtacctgtacagaagagattgggtccatgtcacacacttaggccaaggcagcccgacacaccaaccctgcagacctccgagtgtccactcacaacagggtgggcagaaaagggggtagctaacactgcggatccctgagtgtccactcccaacagtggtgggcgggaaacagggtagctaaccctgcagacccccgcgtgtccactcacaacaggggtgggcgggaaacggggtagctatcagcaggtcaccacccaaggacacagaggtccccacagcccctttctcacatgggcctgccaaggtggacggccagtccctagcatcgacttaaggagcatgcgctgttgacccccaaggtcagactttagaaaaggccaatggacaaaaatcagaaccccgcagacagcattcccccaataagctgatggcaaggctcaaagacgtgtgttggggcactgatacccctgggagagcagaccccacgcggccggcccactctcctgctgctcgggtgaagtggagctgcagagaaccacacaccatgggacagaaaaggccagctccgcactctcccggtggcagcagggcctagctcctcggtatggagaacgcaggctaaccaggcttaggctcctggaagacggtgctgccaagactctgattcagtacactaaatgtgagttgagtgcaccacaccccagcactccactaaaagccagcagaggcagatggagaggtgccaagtggccaccgcaaactagaccagcacgctgcctgggctggggggccaggtgacgatcgtgcagaatctctagccagttggtttcgtgcattctcccacgttcagctgggtggacaggcagcaccgtcctaccgtcccccacccccgttcccgcccctgccactgccggcacaccctggctctatctgggcctcagagctggggggaggaggggcacaggagaaactcaggcctgctgggtctcgggggatgtggggtctgagagcctaggtgcaggtcttggtggacggggagcacaggggctcttgaggggtctctggtggccttatctgaggcactgcacatggccctggccttgggagcacccagcaccaagttaagaggggctccgtgaggccaacgctgccccaggcttcacatgaatttcacgctggcctctgcctgtctagggaagatgaggaggaagtgagggtcagaggccttgggtggggtgttcctgaagggccaacagtggtaggcagcactgagcctctgggcccgagggcctggcaggggccaggagctgctgggacctctcagaggcaaggcgcctgtaacaaagcccgatcactaatcatgtccaccccaggcctcctgatgaccacactgacacatggcagcctggtggccgggccagtggggctgagtcttcactcacccaaccccagcagagcctcctcttgggcatggccttggcctttccaagcctcagagtgcagccttcaggggtgggccccagtgagaggccgagaagaaagggtgggctctggaggtggaggggcctgacttgttttacccacaggttcaggctagccatggccacccgaggggctcacacattccctctggtgaccagctgtgggactgcaggagtggagacaaagtttggggactcccagtaaacagtagaaaagagggttcaacagctcccaggccattaattttcgagtctccaggcttggggcctgaagggcacactttgctaagggtctgaagggccatgtgtgggcttgagatgagaggctggcaggggttgggccaggacgattcactgtccttgttcccacaggccgagcctctccaggctggagcgccagctgcctgtgcatggagcctgcagatctggaacaatctgcactgtcgacacccagggccccaggacagggctctaaggcctctcttttgttctcgaacccttgtgggcccaccagccctcagttccctcagtcccactctccccagggagcaccccaagcactccgcatgggatttcacaagcacctccacggtaacctatctcaagtagaactctgcactaacttcttcctcaaaacacaaaaacttggctcactgccaccagcctgcctccccacggccccacgagtgactcacccaggatcccaccctctcggcacccccaccccagctgcatccagtccacagcaagtccagtcagcgctccctgcaaaggctccctggcaacaggagtgtgtgcactgctgggcgagcgggccccgctgcctccaaggcaaccacacctgatccgtttccaggggcccaccacccttggcccttcaggaacaccccacccgggtcctctgaccctcacttcctcctcattctccagggacaggcgaagggccagcgtggaattcacgtgaggctcagggcagtgttggcctcactcagaccttttcttccttggtgctgggtgttccccaaggtcagggccacgcgcagcaccggtcccaggtgtctgctgaaggaagcctcctccactgggggtcccacctgccaccctcccctctctccccagctatgtgcaggggcctccaaagccacaccctggccccttgaccgtccctctccagaaacactgattactgttctccaaaacccacccgggagcccacatctactgattacgcctgagtcattcgttcaccaagaaatatgcagggcttcctgcttcaatttggggagggcgaagtggtgcaggacagcgccccgatggccccctgggaatccagagaacatgcagagtgggcgtggggggtctgggctgagcagaaccgggcctcccgccctgcctgccccaaagccctgagggctgcggtcagctgccctttcccactcaaacccaatctggattcccagctcctctgcctcaggccgcgcccgcgctgcggtgggggccgcccgggcctccccgcctggacccaacagccgacgtggcccccgccccgtgacgatcagaaacgtctccaaacagctccctcggccctggctgcgggaccagccccgggcctgaccccgggccaccctcccactccccacgcgggggcaccgtggcctccatgggtttggctcggaccctctgtccccagcccggccacgcccgccccctggggttgccctaaacctggcggggggctcctccgccacccgcctcgcgtgtctcaaggcatgacagggggtcccggagaaccctgcctcgcccgggccaggaggcggcccagggacgcccaccccgctccccggagtccgcgcgccctgtggggtccgtctgcttgtgacactaaggggcgccccgcgacgggggggtgacgacccctactcacaccacattccgcgccatggcggccacgcgcgcttccggg

SEQ ID NO: 1576 - DNA, 9273 bp, Homo sapiens
ttccggctctttctcctgcagcaagacttttatttaggtgtcgggactgctctgccacagctgcccacctggggcgcgtccctgctggccgccccgtcacggcccgaaccagctggggatgccgccccgccgcgggtcgctgctctgccacagctgcccacctgggggcgcgtccctgctggccaccccgtcacagcccgaaccagctggggacgccgccccgccgcgggtcgctgctctgcctctgctgcctctcctcctcgagcatgctgtagaggtcgtcggcagcgctgccttcagggctctcgtctttctcgggaaacagatctgggaacgtgaaggtctgtccatgggcctaagggggagaacaaaggctccagccagagctgcaaagactcctcagcagaggggtctgtgggggagcctcatgctttctggcagcccctttctgccggcgccggattcaactgctcagaggtacctccctgggcctcctggggcagcgtccctgcctggaatgtaagcacccccacggccaccggcccccggctgtcacgctgcagcagaggccacagctccaggacagggccgctttccccaccattgtctctttagggcctggtgtctgcccccgccctgggtgcacccatttactagcacggggccacctggttggtggggggcagaaacaaggcatggaaaaacatgacacaaatcacgtctggtaccatgctgaacctgtccatccaaaatgcctcaggctctactcacattaaagctccccctcctcccagcccagagcctggcaattaaagtgaacatcacgtacgaagaaacatgcacgtgcggcagttgataaatcaggaccggctctgccaattaactggtcttacatcttctgctgagagttcagaatatgtccgtgtcagccaagccccagcccaggccacagcatgtggctcgggttcacgagaaggaggggatactgctccttggggacctaagcaaatacaagaagccatcttaacttgctaatgattactaagtgctccaaagctaagaggcagaaagagcagaccagaggagagggaagagaagagggaggaggagtgaggatggcacccgaatctggaaccctttagtgagtaaaatcagtcaggtacacttggctcttgcagaccctttgtgtgtaaataaatctggatgtgggcaggcagccaagtatgatctgaaacaggcccagatcccaccctgcgagggaggtgtatgcaccctgatccctggcgcagagcgcaggggctggcggggagagtggcactgcgtgcgccgtagccggcctgcaggaggattgccttacacagctctgaactttgcgtcttttaaaataccaaggggcagtcgtttacacgtgaggctgactgcccagaatgggagattcaccttgactatatggaggtgattctgctagttttccgaggcaaggggaacccaaaatgacagtttaaagcacaaacatggccatttgtcacagcttcgggaagaaatggggaaaggtgctgagagaaaatccgtttcttacaggagacaaacaccgtttggggatgccaagcatggtttcccaggggcttcccctttctagaagagttcaccttgtacctaaaaaaaaaaagcccttgatccttccaaaaaggagagagacagctgatcggggtaaagaacaggaatggagaaaaatgtcccaatgacaagtaaacaaggcagccctgccttcaggaatcccagggcgccctgggggctgccgcctgcctggacctggaggccggagccccgagcacggagctcggcccagctggcggcagcggtttgttctggagttgcctctcatgtcgtgcgcccttcattcctgcgcgcccttcattcccgcgctgctcagcatccacacaagcctcggggcagcgggcagtcaatggtctttttgttgtgtgggtcactgaggcgctgctttcagctcccaggactttgggccaaggagatgcttatcaggttgtcggagaaagaaatgtgggactcccgccacgtgggacagggcctttccacagcggccaactccaaataacgtggataattttacctttccaatgctccctccctgggctttgcaattagcagtgattctaagccctggcgcagggcccagggggacacgctgagcaaggtctcagcagacacgagacaggaaagggccttgagagtcccctctgcgggcagacagggaccaacggccacggcccatttctaggctgtgcaaagatgtgctggagttcaggaaggggggtgaggacccgttacaaattttcattctggaacaggaggatccatgcccaactgggacccttcaggctcccagttgccctgccctgtctctggctgcctggacttcacagagggagaacaacacgcgggcagcagctgcagacaccggatcccggagctgctgggttcagttttcatgggaggtggggcccagaggaagaacgcaagggctcggatgacttgaatgccacttgtagccgtagctgcttttgaagtgcccgtggcggtgccggcacacgggatgtccacccacatgccatgacaaagacagatgggcccgactgacactgagcacacagaggcctttatgaggccaacggctgctctccccacctggattggctgatttcatgcacagcaaatatcaggccaaattattccgggggcccctgtttagaacaacaaatgtgactgtttttcagaaaagctgccatgctaacttggcctttttcacaaactgcctccttagccccacaacaggccggctggcccaggaggcggtttccaccatcgtgtgactgccatctagtggcagggcccgccggctcggcctccagggaccatttacaccggaagacaaccccatccccacccagtaaggccagccccaggggcagagtggggaggcccaggaggcggccggggcaggctgtggacatcttggcccagagagaaagtgcctctgggtttgcctgggactcaaaatgaagagcccaaagaaaggctttgaaactgtgggtctcactcctgacaagtctgggtttcagaaactgaaggcccaggcaacgtggggtgagggttcttcctccccagagccccccaggatacgtaagaaagcacctgctcagaagcagcctgctgagccctaacaagtacgtgggacctgctaccctgcaatgcaggacatgggcctcagccaacagcccggccagccagacctgccttggcaccaaagacctttgccctcaggggcctcacactctgcctccgaggctgaaacccagccaaggacaggctctccagaggccggggcctcccatgctctgacaccctggtgtgcgttggagttgaaacccactaggcctgtgatggctgcctttgcccacagagaattcaaacttcaaaatcacaaaacggccggacgctgagacgtgccccatgtgccccagtgctcacgtgctcccagcgccaccactaacacccccaaggccgtgacggagcatgaccttatgtggagcctgcctctgcgctgaggccctgagatccggcctcacgggggctccctgggccccagcgcagcgtctccggcacaaacatccccaaggacacagttgcgaggagcccctcggaggccccgctggggctggccagctcacacgcaccagctgcacgtaggcgaccttgtagtccggcttcttgatcctcacgtttctgtgatctcttctcttgttagagcctgccggaagggagtgaaaaaaaaatcagaactttaaaaaaatcagaactttaaaaaattacatcctcagaggtcaatgccactaaaacgaacctctgctctcttaaaaatgtaaatatgtttttaaaaactcaaaaaggcgatttctcagggaaatgggcactgtaatcaaacgagccagcacagcaggctcccaggctcctcccttctcccaacagaggccagcaggttctcaacaaaggagcggacgtggcaccagccagggcacacgacaggggcttatggaacagacagcgctttgctccccagcctcagccactgcagtcccacctcgggggctgacggcaggagtcagggctcagaatggaccccgggccagcccagttgaattccaatccctgctctggcacgtaagcaccgtgtgaccctgacaagtcaccctgtgcctcagtttcccatgagccacgtcagaccaagacccccatgcagtagctgaggctgtggctcggcgaggtgggcatgtggcacagatgggcacgacaccaacaggagaacctcccatgggcactcaccatgctgcacccgtgtccgcacagcagccacgggcacgttatagatgccctcgaggtaattcctgaggtccacccttgtcattctggaggcgaaggagaaagaaaacggcatcttaaccaggctaaaagccaaaaatactgtcccagatgcacaagcacccgaggctgagaggccgacagaccaagacccacagggggcagggaggagggctgggtacatcagcggcactagtgaggccaggcagccccagcaacaccagtgctgctggctgcaagactccctactctgggcacaccagcatggggtggcagtggcacagaccccacagagtgggagcactgcccaaccaacccctggcctgctccacagccccacatggctccctgctccgggcaagtgcctgtgagaggaggtgacagtctctgcacgctcctggctggcaggtgccccacctcgtctgccccggggcccagtggccgcatcagggttaggcctgctctgcggctgatgggactgatgcggttctaggaagtaccttctggaaaggcctgcctggcattcggtgcgttaactgcagagttccctctactgcagaacctcacggtcactgtcaactcagcttctgggcccctgcaggctgcacaggcctgaccttcgcccccaggggagctcacgctgctgccccgcctggctcgcatcaaccctgagctggggacctgtgaacttaaacactgcagagcagcaccccagttttgctcgtagggactgtgcatttctctgaaggtcaagcaggctcttctgagcggttctgtacatcacggcctgctcccaacccagcctctcagggcgcctctcctaaaaagaagctgcaagaactcaacagaagacgcgagcacagaggtccaaattttaaggcttccagtgaagccgtccccgggtggagggcggcgtgcagcctgcctgccgggctccacacctacaggcactccatcaatacttgccgggcagggccgcctgaggtgccttcccagcaggaagaggctagcacgtgagcagagttgttttaactcaggacccaggcccccctgagggcactctcccaacccagcgggaaaacttccgggctcactccacggggatccccccgagggtgctccccaaccccagccggaatcctcccggactcactccatggggatccggaactgcacggtgtcctcgggctgggccacaccgggccgcaccagctgaatgaagaagttggttcggaacacccgaagttgtgggccacccagccggtacagggggtacctgtacagaagagattgggtccatgtcacacacttaggccaaggcagcccgacacaccaaccctgcagacctccgagtgtccactcacaacagggtgggcagaaaagggggtagctaacactgcggatccctgagtgtccactcccaacagtggtgggcgggaaacggggtagctaaccctgcagacccccgcgtgtccactcccaacagtggtgggcgggaaacagggtagctaaccctgcagacccccgcgtgtccactcacaacaggggtgggcgggaaacagggtagctaaccctgcagacccccgcgtgtccactcacaacaggggtgggcgggaaacggggtagctatcagcaggtcaccacccaaggacacagaggtccccacagcccctttctcacatgggcctgccaaggtggacggccagtccctagcatcgacttaaggagcatgcgctgttgacccccaaggtcagactttagaaaaggccaatggacaaaaatcagaaccccgcagacagcattcccccaataagctgatggcaaggctcaaagacgtgtgttggggcactgatacccctgggagagcagaccccacgcggccggcccactctcctgctgctcgggtgaagtggagctgcagagaaccacacaccatgggacagaaaaggccagctccgcactctcccggtggcagcagggcctagctcctcggtatggagaacgcaggctaaccaggcttaggctcctggaagacggtgctgccaagactctgattcagtacactaaatgtgagttgagtgcaccacaccccagcactccactaaaagccagcagaggcagatggagaggtgccaagtggccaccgcaaactagaccagcacgctgcctgggctggggggccaggtgacgatcgtgcagaatctctagccagttggtttcgtgcattctcccacgttcagctgggtggacaggcagcaccgtcctaccgtcccccacccccgttcccgcccctgccactgccggcacaccctggctctatctgggcctcagagctggggggaggaggggcacaggagaaactcaggcctgctgggtctcgggggatgtggggtctgagagcctaggtgcaggtcttggtggacggggagcacaggggctcttgaggggtctctggtggccttatctgaggcactgcacatggccctggccttgggagcacccagcaccaagttaagaggggctccgtgaggccaacgctgccccaggcttcacatgaatttcacgctggcctctgcctgtctagggaagatgaggaggaagtgagggtcagaggccttgggtggggtgttcctgaagggccaacagtggtaggcagcactgagcctctgggcctgagggcctggcaggggccaggagctgctgggacctctcagaggcaaggcgcctgtaacaaagcccgatcactaatcatgtccaccccaggcctcctgatgaccacactgacacatggcagcctggtggccgggccagtggggctgagtcttcactcacccaaccccagcagagcctcctcttgggcatggccttggcctttccaagcctcagagtgcagccttcaggggtgggccccagtgagaggccgagaagaaagggtgggctctggaggtggaggggcctgacttgttttacccacaggttcaggctagccatggccacccgaggggctcacacattccctctggtgaccagctgtgggactgcaggagtggagacaaagtttggggactcccagtaaacagtagaaaagagggttcaacagctcccaggccattaattttcgagtctccaggcttggggcctgaagggcacactttgctaagggtctgaagggccatgtgtgggcttgagatgagaggctggcaggggttgggccaggacgattcactgtccttgttcccacaggccgagcctctccaggctggagcgccagctgcctgtgcatggagcctgcagatctggaacaatctgcactgtcgacacccagggccccaggacagggctctaaggcctctcttttgttctcgaacccttgtgggcccaccagccctcagttccctcagtcccactctccccagggagcaccccaagcactccgcatgggatttcacaagcacctccacggtaacctatctcaagtagaactctgcactaacttcttcctcaaaacacaaaaacctggctcactgccaccagcctgcctccccacggccccacgagtgactcacccaggatcccaccctctcggcacccccaccccagctgcatccagtccacagcaagtccagtcagcgctccctgcaaaggctccctggcaacaggagtgtgtgcactgctgggcgagcgggccccgctgcctccaaggcaaccacacctgatccgtttccaggggcccaccacccttggcccttcaggaacaccccacccgggtcctctgaccctcacttcctcctcattctccagggacaggcgaagggccagcgtggaattcacgtgaggctcagggcagtgttggcctcactcagaccttttcttccttggtgctgggtgttccccaaggtcagggccacgcgcagcaccggtcccaggtgtctgctgaaggaagcctcctccactgggggtcccacctgccaccctcccctctctccccagctatgtgcaggggcctccaaagccacaccctggccccttgaccgtccctctccagaaacactgattactgttctccaaaacccacccgggagcccacatctactgattacgcctgagtcattcgttcaccaagaaatatgcagggcttcctgcttcaatttggggagggcgaagtggtgcaggacagcgccccgatggccccctgggaatccagagaacatgcagagtgggcgtggggggtctgggctgagcagaaccgggcctcccgccctgcctgccccaaagccctgagggctgcggtcagctgccctttcccactcaaacccaatctggattcccagctcctctgcctcaggccgcgcccgcgctgcggtgggggccgcccgggcctccccgcctggacccaacagccgacgtggcccccgccccgtgacgatcagaaacgtctccaaacagctccctcggccctggctgcgggaccagccccgggcctgaccccgggccaccctcccactccccacgcgggggcaccgtggcctccatgggtttggctcggaccctctgtccccagcccggccacgcccgccccctggggttgccctaaacctggcggggggctcctccgccacccgcctcgcgtgtctcaaggcatgacagggggtcccggagaaccctgcctcgcccgggccaggaggcggcccagggacgcccaccccgctccccggagtccgcgcgccctgtggggtccgtctgcttgtgacactaaggggcgccccgcgacgggggggtgacgacccctactcacaccacattccgcgccatggcggccacgcgcgcttccggggt

SEQ ID NO: 1577 - DNA, 14886 bp, Homo sapiens
ccggcctcgcacttccggtggggagattccggcctggagctcccagggccgaggtgagtgggtgtgcggccggcctcccggcgcactcccagaggctggggggccggggctggagaagggaagcgggctccccacccgggatctgcgcgggttgacatggggcacgccacgcccctgcccctccccgggcctcagtttcgccgtctgtggagggggcaggggtctccaagcgccctcctgcaaggcacctgccggacgccggctcatctggtatttcctgagcacctgcgacgtcctgggtgcgggacccgggccggaatcggacacggccctgccctctgaggggctgcttcccgcggtgggattggggcgggcagtaaacacgtgagcaaacaaggaaacgtcagaggtgggagtgccacgaggattgggaggggtggggcattggagaaagtattcagccaagcggaggtctgcggaagggagctgaaggcaggaagagcagcaagtaaagaaaaacacaggtttgatgtgtttgacacgtggcagggggccgctgtggcgggtgctgggaccagtggcagaagaatgaggttacagaggccttccttgtggaccaggctgaggagctgggcttagccttagggcatgatctgtttcgtgtgccatctctctggctgctttatagattccaggccttaggggcgaaagaggaaacagggagaccagttagaccagtggcagtcagcaggtgaaagataattgtggcttagactgtggtagtgggaatggagaggaagagaagtagaggggtcaagaagtgtattgaaagtggaactgacagggcaggatttgagaaatgacagaaataagtggtcaaagatgacttcatcatagatttttggttttggcttaagtaaccaagtgtattatgctggcatttactaaatgactttgggatagattgggagcgtgagaaataattacgaaatcttcttagggcatcttaagttttagatatttggagtgcagctaccaaataggcagttagatatatgagtctgatacagaaaaggtcagggctgatgtaaagaatttagaaatcattggcaagtggattgggtaggatgagattatgtagggtaagatttaagagagaagagaagccaggttccaagctttaggcacccaatttttatagattgagttgacaagaaggtgccagcaaaaaagaccaataaggagtccagaaaagcagaagaaaaaccaggagaatgtggtatcgtggcacccaagagaaggttttttctaggaggaggaagtgatccattgtgtaaggtaagaatagagactaagccggcccggcacggtggctcacgcctgtaatcccagaactttgggaggccaaggcgggcagatcacctgaggccgggagttcgagaccagcctgaccaacatggagaaaccctgtctccactaaaaatacaaaattagccgggcatggtggcacatgcctgtattcccagctcctcgggagcctgaggcgggagaatcacttgaacccgtgaggcggagtttgcggtgagccgagatcacgccattgcactccagccttgaaactccatctcaaaacaacaacaacaacaaaaagaatagagactaagccttcgaaggggcagcagggaggagggtgtggtgactcattggagcagtggagatgggctgaagtgagagcagggggtgaaggagttggactggcagtgcggggtcctctggggaagtttcactgttaaggggaccaggaggggagtaagcctctaccatgagccagcatttaatgctgtacctgatgccactttacagttggagaaactgagtccagaggtcaagtaacttagggtcacacagtagtgagtagggacaccaggatttgattctcagtgtctaactccaaagcccacactcttaagcactaaaccatgctgcccaagttacagttaggaagatggagggaagcaggtgtgccagtgatgcaccagccagccttaccttgatgtgactgctgcccccagctaagctgctctctgtggaaagtggggcagaatatggactttccttcctgagcaaatgagatttcaaaaagagttgtttactcctttaaatcttgtttcccttataaaataagggtggggaccttttcagtttcacgtctgtgtctccagtggtgggcctacaggagtgcttgataaatgctcattaagtgcctagatgatctccagggacccttctagctgagatttggctttgtgtttgggcataggtgaccttctgaatcccaataagaaaataagttaaatttgagacagtgcttcttgtaggcggggtagccatagggacttattggaggcaggggaactgggccaggtctgtgaaggaaggtcagcatttgaacagtggagggagggtgttgcggtgttgcagtgctgcagcaggaaatgcagcaaaagcaggagctgcaagaagttggttaacagaagagtgaacagacttccctggcttggaagccacaggaggagccatgagggaagagtgctcagaagaaagctctgttagtgccagcatgtcctgtgagtgcctgtcacaggacagggtcagcagtggttctcaacagggagcaggtttgatcctcaggtgacatatggcagtgtctagagacatttcttgggtatcacaacttgggatggggggaaggatgtgacaggtgtctggtgggtatgggccagggatgttgctaaacatcctgccatgtagaggatgggtcttctcacaaagaattatctgtccccaaacagcagtaacgcccaggttgagaaaccctggcgtagaggaaacagtgtgggttttgagatctgtagacgtatgtttgaggcccatgcgccctctttgttggaggagcctgatggtggtggttgcaggagaagtagagagaaccgtgtaggagactcctgcagtcatttggggagaggatggtggctgagatggtagtggtggagttcaggacatgtgctcatatttgggatatttctgaagatagagctgacggtatttattgattgaatgtgggctaaggggaagagaggaatcagatgagcctaaggcttttggcctgagcaactaggagagtagtggagccatttgctgggatgggaagtaggaagaggagcaggcttggatgaaatgggggtgtggaaaacacgagtcagtttcagacactctagatgtgagtgagatgcctgatattagatatctaagggaagaagaggttaggtaggcattggatattcttctggagttcacatgaatcagagccggggcatatattgggaagacatcagcttacagaaggcatttgaaggaatgagaatgcattaggtcaggtaggagtctcaactcattggatctgacacctcttttttattacaaatattttgtaacagtcccttttattaccctaaaatgaaacatatgattaataaaaactgcctacacataattttttaaaaatcaacaaatgcagccgggcgcggtggctcacgcctgtaatcccagcactttgggaggcaaggcgggcggatcacctgaggttgggagttcaagaccagcctgaccaacatggagaaaccccatctctactaaaaatataaaaaattagccgggtgtggtggtgcatgcctgtaatcagtcccagctactagggagcctgaggcaggagaatcgcttgaacctgggaggcggagcttgtggtgagccgagattataccattgcactccagcctgggcaacaggagcgaaacttcgtctcaaaaaaaaaataaaataaaatataaataaccatgccctataacataaaaggaaagtaattgatagtaaaacaaaatatgtttcaatatgtaagtttctgggcacaatagtgctggaagttgcagtgaagctgtcccttctgtgtggaccctctaggagtgtgatggccacagacacagactgacacagccgtgttgtgtcgcacctcgaaaaccactagtgccattgctgtagatgatgtggtttttccagaatggacacttttggtgccattttgagaccaattttgaccattttcagtctcccttcattgtacataggcgtcttattcttggaagtgttagttcacagcagaaccatggaaacactgcactgtgtttacatgtaaacagagttacattctaggttcagataattataagctaatctttcacctatatggatgtcaaagtcgtgcgggatgcagagcagtaattggctatgtggactgccccttctttatccctgcttactgaacgccaggagcatatccccaaaataccgccacaggtttccaaagctcctctgaagacaactgtagccccagagattcatttggacacagccagctccctgtttgccccggggaggggaaatagtaacaagagttccagagtgcagaatggaatgtaactgctcccttcagaaatgttggggtgggagatggagaatgtgtctgatcgtgaagcctaggaaggcttcgagaagaaggtggcgtttcaataggatgggaatgtctcaaaggaggatctgtggttgaggggggcacccagatgaagcagcaggtatcatcacataacactggacctgaggctcctccaggcacagacaggtctacccggcatgctccgggcactcatcagggttggctggattgacagggaggctgggagtggtttcatttggcaataccgtaaggcaggctctgcttccagggagtagtggttacagcctggtcttacagtgttccagccgttagagtgttggtttccttctccatttttaacccctaaagaccagaccagtcccctgaaaatcgcatgcctgctctctgtcagtcatcaaaccagacggagaacttaaagtacaccagctgtgcgtaaggccagtgtggtcttactggtccctatctttgtgccgctcgtagcctctcaggggacagacattactcaaatcacaccctgcacaagtgctatgaaagagaagtaggagagccgtgaaagcaacatgtatctcaggggactgattcaggggatggggtggggttccctgaagaagtgacctctgagctgaagataggtaggattgatgaaggactgaagggtgggtgcagtgttcgttcatttccttcagacaacgggaagaaagctggtgtgtttggggagctgaaaggcgcccagtggggccaggtcctggagagcctgtggctgagactgggaagaccagcagggccagatgaggccatgggagccgaaagaagggtgctggtctttatcagaaaagcactggaagctgctgaagggttttaagcagtggcctgacatgatcagtttgtgttttaaaaggtcactttggtggcagttcatggagaatagcttgaggtgacaagacagcagacacgacgtgggtctctgggactgcctgtgccgttgtgggcagcccctccagagccctgagtcacgcagccttcagaggcacccatggctacgagaagcacagtctctgcctgaggctccagagcggccctttttccccagcagcagaccttgggacctgtgagcgctgcatccaattaaccatgggaagggtcagcaccagccaccagccccttaggtgaggactctgcctggggctctgctgatggttccgaatcatggagctgcagagagctcctccagcctggagacgttcttggtgaaagctgtggtctaactccaccggctcttcctgcacattgtattcaagaggggtgcctgcccccgctgactcaggagctccggtgctgcagccgccacgaatggggaggtgggccctcgatgtggcctttttgtggaaggcggtgttgaccctggggctggtgcttctctactactgcttctccatcggcatcaccttctacaacaagtggctgacaaaggtaccaggaggccttgctggggcggggtgctgggatgaaggtggccagagccatggctacggtgcccttcatgtttaacaggaaggcacaagcttcaaccagtctaactggaagccagtcacggctgggctggaacagggccctccaagcctgccgtgccagggttccccttcagtgtttggatccagggaaaccaaggagagcggggggtgtgaagggatgagctggggaaactggggctcaagcagcagctatttaccccactagagaagtatttcaatattttaataagtgatacaacgtagtgggccgcagtggctctcacttgggcataggccgtgaggaaggctgggcaggtagctcacaggtgtgttgaaatggtggagacagcaccaggctaggattgagtctcttggctgccacctgtcttcgtgacctaagagtctgtcattccaagcgatgataccgtaactaagggccctacacacatagcaaggtcctcatgaaccaccgaatgagccccactccagcagaggggcgaagaggaagagggagccggtggggggcaggctgtctaaaccaagccggggtgtctgctttgggctccatacagagcttccatttccccctcttcatgacgatgctgcacctggccgtgatcttcctcttctccgccctgtccagggcgctggttcagtgctccagccacagggcccgtgtggtgctgagctgggccgactacctcagaagagtggctcccacaggtaggtgggggacctcagtgagggcagagcaggaagaggggctggggaaccataggatgagaacaagagagacacccgcatgtctggaagccaagtccctcccctcttcctgcactgttcctcctctgccctcttgacctggcctcccaccacccacgctgctgcctcttgtgcactgcgtgccttcccactgccccaccacacacccacaaaaccccccctgcacctgcggccccgcagctccctctcctgccagcagacaccgagcctggagtgcagccctcaggcctggagataagtggtgagcaggcagggtccctgccctcgcagggctgtgacacggacatggagggcactacggagcccagggaggggaccaacccaaggccggggcccatggctggtagaggaagatttcctaggccaggtgccaagtaggcagagccctgaaggatgcgtgggactggttggccctgggaggaggggccctcgtggcccgagggagatttagtgccagctgtggggtctggaagggaactcaaagtgtttcaggatactgagaacccggtgctggccagaggaagtgggaaaaatgagaactgagagggtgggcaggggtcatgtcctggaggccggattccccgtggaggagtttgtgttccatcctgagggaaaagggtttccagtaagggatcaaccagatcaggttaatacctccgctcagggggctcgccggagtgtttgtggaaaccataccggcccagccagttggaatgggccccagccctaatgctagagcagcccccgacctttgggggccagatattaaccctttagttgctggtggaaaagaaggcccaagggccccacaggaggcaccgggatggttcagaagtgggggacactcaggtgcctcagggtaccagcccaccccagcagagtgtggacctcccaagctgtcctgtgggtgcctgtgtcttcacagctctggcgacggcgcttgacgtgggcttgtccaactggagcttcctgtatgtcaccgtctcgctgtgagtactggccatgccctgctgcctcccttcaggctgaagctgtctgtctgtccagcggggtgtctgcacacccggctgctaggccagccactccaccactctgggaccagcccttgctctctcagcctctccctggcacccagcagctctccgggaagtcgccagcctcttccgtaagcccagcgcagaggagatgctgtgcccacctgccaggcagcgtggggaagccagggagctctcccagaaccccatcatcagagcaggggaaggcaggctgcaaggccacagacaggtggccactggtgggtggtacacgcagccgcagcagagccctatgtggcctgggggctacacaagagtttcttcttccctctgatgttttgcttcagagagcactgttcctgccttcttgtcctcctacttctcatccttccttcccgctcctgggctctgccgagggttaggtaaagaacaggactcagggagctcaacgtcagacctgtaacctcttctctctggtgataaccagaggcctcttagtcagagattccttctgattaaaggtcgcttatcactcagatgacagcccagctctgtttggtcatttcgctcagtgatttgtgctcctgctcctttctcggtgatgggtctgagccctgagctccagcagtgcattgtgggtaattttgcttccaggtacacaatgaccaaatcctcagctgtcctcttcatcttgatcttctctctgatcttcaagctggaggagctggtgaggccccagcgtctcttgtgtccttcctgcccccacagatgctaagaataaagtgggagtctgagcagtggcttgtcctgctgtgtgacagaggagacaagcccagtccaggtggcagtagatccctttctgagaagggacctagacatgggcaatactcagaatatttagaaaccagtgtggcagggtaatgaccaaaggtgaaagcactgcaggatgagggtcccagcagagctgggtctaggaagcaccctgctgtgggaggcagtagccctgtgtgttaggcccagggaggaggtgggaccacttgggggcctaggacagccgtcagtgtggcagagcaagcagggctgttggcataccagctgaccgtcagccctacatgctgacattggtgggcaaggactgtccaggaccccctgggatggagctgaagggtggaaggatttcttgccccaggggcagccaagatggctgctgaccccaggctccaaatgtgatgaacccttgaccctcaagacccccgagttagctgccactgctccccatcctaccagcgcgcggcactggtcctggtggtcctcctcatcgccgggggtctcttcatgttcacctacaagtccacacagttcaacgtggagggcttcgccttggtgctgggggcctcgttcatcggtggcattcgctggaccctcacccagatgctcctgcagaaggctgaactcggtgagcacgtgccactcatcctccagagagaggaaccccggcacaggcagggcggaggcagggcagggccggaccagacctgatggtgcctgtcccccgccctgcaggcctccagaatcccatcgacaccatgttccacctgcagccactcatgttcctggggctcttccctctctttgctgtatttgaaggtacgttgggccttccctctcaagggcacctcagtgcagcagaccacagatcctcgccctgagcccaacacagtggtagctgcagagattattgagatcaaagatgcagtccctcccctggaagcgcatggtttggggtccagcatgataaacgctacagagaaagcacatataaaattcagggaacagtaacagtaagtgtgcacagagccctgaaagtgcaccagggctgttctgatctttttaaacataggaactcatttcatccttccaaaaacctggtgtggcagtactattattatcccccattttgcaggtagaacaaaatgaggcccagagaagtaaagataacttgcccaaggtcccatagctcgtaaatgagccagaatttgaagccagcagcctggctccaagtggtccagccctactcttaaccaccctatcttgcctctaaggaatggggaatcagggattgttccaagatgctggagtaatcaggcaagtcagaaaggcttcccaggccgtggtttggagggtgagtgggattttggcaggctgcagggagcaaggcatctcggaagtaggaataggaggttcagccatgtccaggaatataacctggggatgtgtgttcaaggagtgtgggccacgcaggatcagcagagggtgggcttccagagctgggggctgaagaccaggagccagcacacaggagcctggggacatggtcagttgttcctccactgtcgtcctccagggatgaggagagccctggagaactgtgtaggctgggaggtgtgacgccaccttcctttctttgatgttttgggattagcctttgtcccctttctgtttatccttcctcccagagtcccgtctgtaatgccctcagggtcattacagaaaattctgtcccacatccatttaagtttcaagcagtgaagcgtcttgaacctccccaagaaaattattctgaagccccgttgtccaggaaacttctgttcagggcctcgttttttttccttctttaaaatctctccccactccttcattatgcccccttgtaccaaacgccacactctccctcccctcccgtgtgtttacaccatgccccatctctgcaaaacctcatctgaaagcccctggtagtcgtcacttggcaaagctgcatggatttagctcctttaatcttttctggtaaattaatcccccaagcgccttcattacttatgctgctcttccccgaattcccttcaatttgccgacgcctttgcagttctgctgagcccagcaccaaacaagatgtcctacactgtgaggctgttttgcctggggggactgtcactcggcatttctttggtgcttccctccaaaaatctcaaaatactcgtccagcttccagctaccacagttgtctcttgtgcccagttctgggccccccttcaccctgtgctaatacaccacgaggactttcgtgtgggagggacgccgggagtcattcttccagatggacagtgttggagggaccatgactcctccgaaagtctaagctgaatttggggtagggggtgtgcatgcctgtgtttctggagcaaggggccatgtgtttgcattttctttttgggaaatgttcatcaagtgataccacgggttggagaaataccagtctggtcccaggcctctcattttatcagtaaggaaactgaggtccagaaaggggacacatctcagcccaagtcccacagctctgtactagcaagacctagattaaaatgaacgtttgtagggatagaattttgtccctgtttgtaggtgaactggctgaaatgtagaccaaggagttccctgagtgggctggggcactgttggtccttcgtcacttggtagccgccctaccttctttagcccagtagttaccacagctccaaagaccccatgaagtcagcagccatgagcccctccccacagaccagtaagggaatactgtccaaaggtgcagggcacttccatccgtctttccatgcagggccacccccctctacttcaccccagaggctcagacgagccctccccatcattccgctaggatccccatcatcccactaggatctccatcatcccgctaggatctccttcatcccactgggatctccttcatcccgctaggatcccatcatcatcccactaggatccccatcattccactaggatcccatcgtcatcccgctaggatcccatcgtcatcccgctaggatcccatcgtcatcccgctaggatcccatcatcatcccgctaggatcccatcatcccgctaggatccccatcatcccgctaggatcccatcatcctgctaggatccccatcatcccgctagggtcccatcatcccgctaggatccgcatcatcctgctaggatctggcttgtattgcccccaggcgctctggcagccatcactgcttccctggtttccccaggtctcaggccatctgtgtgggatcactttataccttccatgctttttctctgggctgcagacagttagcaggtctcagtaagaactcactactacagtggaagatcttgtgtggttggcattgggctggccaaggcagcccaggacccggcctcccactctctctccctgttgctttcaggtctccatttgtccacatctgagaaaatcttccgtttccaggacacagggctgctcctgcgggtacttgggagcctcttccttggcgggattctcgcctttggtttgggcttctctgagttcctcctggtctccagaacctccagcctcactctctccattgccggcatttttaaggtacagactcgggcgtgatgccagtcctgtcttagagagggagcccccaggggtttctcaccagcagcttcagtcccagctcctgcaccccagggccctgcagagaagagaaggaagtgccccattaggtgccaggcactttgctgagtgctgtgctggcccctccttctgccttgaccacagccctgtgagagggtatgatcactcccatcccacagacagggacacagatggagagccgcccctccccaagggcacagcaggggcctcaaagccagctctgactctgctaggcctggaatgcattcacattttaccttgactgccaactctggcactgggcagtggcctggagccacaggttgaacagcccctatccagactcatcaggaaagagttccgtgattgactggcggtgtcctccaaggccatggccagggctagtgagaccctgagaaagcacccctgtggccagccttgctgtacctctgcctcgcaggcctgtccttccctctcatacctcttctcacttctccttctccctcccacacatttcaacagtcctccctgttcaggggcagggagggacttttctctttggccaggcacacaccagtgttgaagcagtgttgcctaaacccagaaatgcaggcctgtccaagggtcttctggtggccagccgcatgctgaggcatggctgtggttcttggatgaacggccttgccagtcctgtttggagtctctgtttatagagagccccgggaccagttgtgtcttcagtccggggtaacacagcattctcacacataggctcagggctctcttctgtggctgccttctggggcagccgtcctttatccttgtggataaggcgcgatctggacaccctggtccccagcctgggatctggtttgcctcttttattcctgacagaattccatgacaagcacctcctttgttgcatctcacaaaaggaggctggcgggacagcgccgcaagccggccgggtcccctgacctctctgcctgcctgggcccaggatttcagtaagatcttgatctgcccacctgagtgtacctagtgcccccaccttccaccctcctggtcaagcagccaaatctgcctgttgatcatgctccctcctgcttctctgcccccaggaagtctgcactttgctgttggcagctcatctgctgggcgatcagatcagcctcctgaactggctgggcttcgccctctgcctctcgggaatatccctccacgttgccctcaaagccctgcattccagaggtaacccagagtcccttccagaagcctctgttttctgttcttctccctgtgactcttagtgattctgatgcaggaagtgtgcccggtggctctgctgccgtcactcctctaggaagatgtgggggtcatctccagagtgggtgggtggggcctgggtgactcagcacacatgcaaatcagagcaaaccaagaaaaccacgactgggcctgtaactgtggtctctctctatcccaaggtgatggtggccccaaggccttgaaggggctgggctccagccccgacctggagctgctgctccggagcagccagcgggaggaaggtgacaatgaggaggaggagtactttgtggcccaggggcagcagtgaccagccagggcaaatggcttagaagcaggccactccccagcctgctgccagcactcactgtgctcaagccgccagggctcatcatggtagctgggagctgtggacgggagtcaccaggtggtggggccaagccagggactcatgacttttgcccctcccttcagagcctggtcacacaaggggcgagcaccaggccagcctgggactggccagagctgggcccaagctgcgctggaatcgcagcaggagaggggagtgggctggttcttcccaccacttcccaggctctgacagccgagactcatttccaaggcacagcagctttctaaagggactgagtttggactgggttttggacctccaggggctggagcttcatcacctgggcagtgtcttttctcagagagcaggtttctttatagtttggaaataaatggttcacggtccactggccgccttgtgttgctggagacgtgggggcagggaggggacagtgtgggcctggcctctcctttcctttccctgcctggagccttcttcaaatgtctggtcttaagccaggcctccttcattttctcgctcctgttagaacaccagtcccctccccagtggggccccactgcacctgctggcaggaaataaatgaatgtttactgagtactgcattctggagaccttacatgttttcacagcctagtttgaatactggctttgtcactagctgtgtgaccctaagcaaatgacctaacctgtctgtgccgtagttttttaatctgtgaaatggggataatgtctatctcagagtccttttgaagattgagtcattattagtaacagattaaatgttatataagca

SEQ ID NO: 1578 - DNA, 32681 bp, Homo sapiens
aatccgtctgaacttcagttgccttacctgtaaggtaggaatgtttttcagagttcttatgagcatcaactataataatgatatagaagtgagcaatcaactataaagaggctacctgggctgggcacagtggctcacgcctgtaatcccagcactttgagaggccgaggcagatggatcacctgaggtcaggagttcaagaccagcctggccaacatggtgaaaccccgtctctactaaaaatacaaaaattagctgggcgtggtggtgagtatctgtaattccagctactcaggaagctgaggcaggagaatcgcttgaacccaggagacagaggttgaagtgagctgaaatcatgccattgcacttcagcctaggcgacaagagcaagactccatcttttaaaaaaaatttaaaaaaataaaaataaagaggctacctgtacgttactactagatatatgattactatgaagttaccatataaccgatctgtttcaaacaaatcagacttatctagtgggtaagagcaaacccatgggttttgctctcattaattcagccattgttaattaagtgcttacccagtaccatcatcatatgctagtgatgctgctgtctgctcagacctccgttttagagttcctgcagagcttgggggcagctgtggtcttaggcgtattagttgcaatgagtagaaacatagactagcttaatttataggagttttattggcaggatacagtggactttcaggtaccccgagcataggaagtaatagccacataatctggaaagttagcaggtaatggcttttccatctctttctgatttctggcctcagttcatttagatatttatggattcctcctgcagaatcacttcctctgaaaggctcttggttttttattctccatatctttggctcgtacggatctttggcttgccatggtattcgctctgaagcttactatgatcttacttctccagggtcattatcacccagttcccttagtctgtgtcttttatttgtttgtatgtatgtatgtgtgtatttatttatgatggagtctcattccgtcgcccaggctggagcgtaatggtgcaatctgtgctcactgaaacctccgcctcctgggttcaagctgtcctccctgcctcagtctcccgagtagttgggattacaggcgcccaccatcatgcctggctactttttgtatttttactagagacggggttttgccatgttggccagggtggtctcaaactcctgacctcaggcgatccacccaccttggcctcccaaagtgctgcgattatagacatgagccaccacgcccagccagtctctgtcttttaaattcaagagaaagaactggaatagttcagctaaagttgggtattcactttagtcccatcagctatggcagggttgtggagagtgtcattcagttcagagaggctgcctgggctttgtgggaaggacagagtcactgagaatgggggcttattaatatctttcaaatagtttggtggttgcaaatctccatgctttaaaatgtatacgaatttttgaacagccgagaatcattcagggctaactttaataaagagagagtcaatctaggatatgtcatatggggtcaagagaaaataatagctataacctaatgagctttagcttaatctccaaagacggcgttcagaaaggagttaaaaatcatggggtttgtttcttagcagcaccatcgaaattaaggaagggtgtaacttcatttggtaaggactttaaaatgggcatcctcacttggattttttaaattccacttaagaatcatggacttttagacttagaaggcacctgagacatgctttagttctacactcacatctttcaatagaagaaaactgagatttggttaaagggccatgtatacattgtgaaagacctaggattgggtcctgaggcctttggttctaaatccagtcacttgtttcagcagggacaattatcccagcccagtgttctttctgttgtaccttctgtgcctgcttattttaaaaataagaagaagccaaactaaacaaatgatctaaaaagtcatatcgtatagttccatttatatgaagtacaaaaccaggcaaaactcatggatgatgataagtcagaaattcccctttaaaggactggaaggattgacgggaagaggaagtatgaagtaattttctagggtgatgaaaatgttcagtgtctcgttttgagtgctggttacagggagatgcatgtgtatatttatatgatgtatatttatatatacaaacatatgtacccttaagccctctgcattttattgtatgtaaattatatctcagtttttaaaattgacctcacaaccgtgcagtcctgtctactaattgcagcagctttgccgataaggataaggatgcatctctaagcatccagagattgatggcgccacccctagaacaagaactccctgtcttgctgtaactggagcagagcattttccccagaaattatgcagatagggccagtttcttttctgaggtttgtcgtgtgtctaggcacataaaaattacatgtgaaaaattctgccatgagctgcagaagttatggaagccttgggggccataaggccaacccacttcaatccctttaggctgcgtttaattgcagtggacagaagttgaggctggctcaaaggaaaaggggaaagcattggccgaagccagtccaagttctgtcaaccgttatgacttactagctgggtgaccttgggcacttaacaaaacactgagctttagttgtgccatcttcaaatggaggtgataatcctgttctgcctaattcgtggggctgctgggaggacacaataaaataagtgaaagcacttggaaaactagttcctttacattgtcatgttctggaaatgctggctttttatgacagtagacttctgaagcatcccattctgactaggaaatggtcatgaaagcatccctctttctgaggccgatgggcttgtgggggacaggacttttactccttttcatctaagaggtttatacttaccaggctgtgagaactgacatctgtgtttgggctgaaaaattgatagcatacatgcataatagcctcgcgacagctatgctttgtacgccaggagaggcaggtggtccccattagcgaggcatgaattgtgggtgaatggctaaacctggaggatgcagaaaggtctttttcattaagagaggggcctctcctgaacttgtaggcaaggagtgtaaatatacattgaaataatccatcagccaagtgacttcccttcgtcagaccttggagagagaatgctttagttactgcttggaataccagtaagctatcagagttgcctaggataccagtcacatgggcccatcttccagacttgctcaggatgatttattttcctttattttggagagaagtgggggagggggtcagaggtacttgcaaagccttgtccttataagaggggcccttgtgtgaggatatccttacctctctccacttgagttgtcagccgcccttgcccttggcagtagggacgaaaatagcatttcctgtcccagttatcttccccattttctgatgtcgtcccacacagaggaggctttgcattgtgtcctttgaggggaaaggggtggcatcgatgagtggggaggaagcaagagagcatgtagctgggccctgctgatgctgggatcttcctaggatgactgcagaaagaagtagcctggctcctccagctaaccactcaaccaagaaaaggctgtctattcttatctgtctcggagcatatgcttctctcctcccaaggtctcaagacaggaatttgcagtaaatacattcctctaccactgagtcttcttgactcttaaactgaagtgccacattggcatatcttgctactggctgatctatggatgatagatagtttgtcccatttcttcttgctgatttaatctcaagagacaaaatcctaagcagaagttgtggtatgatctagaaaaattcaaaccaggtagtttcatgtgttactttatgcagtgtctgtcttcaaactcttcaaaacatgtaacaagagtgaaaaatgaagaaatactctttttccacctttctgattctttctccccaggcagccgtgtctgtgtttttgtctcgcagaattagagcccattgggaacgatgccaccaccgtcagacattgtcaaagtggccattgagtggccaggtgctaacgcccagctccttgaaatcgaccaggtatgctcctgaagtgagaagcagtggttcaaggaaaggcacctggggagtgcatggcagaggacatcttgagggatggggaccaccggcatcaagagtaagaacgagcaacaggaaggctaagctttgggcctggcccaccctagggaaggtcggtcaccatggcttgggagaggcttcctcttcaacaaaagctgttaggaaagaagttcattctcatgccccagcttgaccctgcttggcaggcctcttgtcagaaccttggcatgagtaggatgttgctgctgttgaaggctttctctctctctctttcagaaacggcccctggcatccattatcaaggaagtttgtgatgggtaggttgaaatggacctcgttttcaacagtggcagctccgactgaaagagcactcctacaccttgaggggagttctgggaaggatctccagttaggcaggtcctcagcatgggggtcttgggaatcattgtcttgggaaggaagtacagttgacaaccatacccctaagacgtttatacttcttaattttttccttaaagtctagcattgccctattgaggtaggatctgagacccctcctcagttctgcacacctcctattgtggtgctcatctttacaaaaggctgaggccatgattttttcaacatgacaacctaaagctttgtttccactgtattccaaataggccacccaatcccttgagcaactcttttgaaaattacttatgagcagcttctgaacaagagagtggccaagtgggatatactgtttttctcttgcataggtggtcgttgccaaacccagagtattataccctccgttatgcagatggtcctcagctgtacatcaccgaacaggttagtacagggagaggcaaaatcaatatgggccttgcttggaattaaacgacccaaggagacggcactatttatcttcactcagcatccaggtagcttccatgtgttgggtaaagagtcactctccggacagactgggaaacaccagcccttgttcttccctagtggctagaaaaaggtggcttttacttcctgagtgcccagggtgctagaggaggatcttagaaattctttgccaaggaataagcaggagaagagggcccgactgaagatcctcagttacatctactgtaaaaaagacaaaacattattgttgattcaacttgcttgtaccactttaacattttatcttagttactttttttgtttatttttcactacccagactcgcagtgacattaagaatgggacaatcttacaactggctatctccccggtaggtattctttcttccttaggagtttattcatgtcacaaacaaatatgagcacctaccatgggccagactctgttctagaaataagtactctggagataagaaagtcagtctttttgtatcaggaaatagtacaggaaaataagtctgtcttggttctcaccacctagtggggagtaaacaaatgcaatagaaggcctgtctcaagggtcttgagagaaagttgcttagggagctgtgggaactcacaaaggggaccacctaactcagcctggagatttccagaaagtcttgccagagaaggcgtcacttagctcagatgttaaaggatgagcaagaattagctagagaaataagaaaaggaaaagtattccagtcagagaaatcagcatatgccaaggcacagaggtatgctgtgtttgggaaaagcaggagtgctgggtggctggaggcttgtagcagtcattgagaagccagatattcaaggttccttgatggcctactcgtaggtttcaactctgtccagaaggaaactggggacattgaagaattttaagcaggaagatatgttatgtttagattttaagttttagaaagatcactttagtgaccatgtggaagatgggccttaagaagaaggttggtggtagtaggaacctttgaagaggctaataaggaatgttaacagcccagtgaaggcaagtggtaatggagatgaaaggatggatatgaagagtatctaggaggtaagctttatgagtatggtgatatgctagatgtggaaggaaaggggagaatggaggatgaccctgatttgtgcaagagcagcccttaaaggtcactaaggaagcaaccagaagggtagaaagaacaccaagaaggtgaagtgactgaggagctttgggcagggagagtgtcaggactgaggagagtatggtctgcaatttttaataagcagagagatttagtaaactgagagcagaaaagctgtctaatgacttgggaggttagaggacactggtgatactcacaaaaaagttatggtggggaggccaggtggccacactgaagtggtcaagtaaaagaaaggtaaaacagtgaggactttgagtctactgctgtatcaagaagcttggttttaaaagaaaacacagagaaggtgataatgcgaaggggacgtggagtcaaaaagatgtgctttttaaaagcaggtaaagcattcatgtgtttcacaaatcaaaaattttcacagagatgtagcaaaaggtctccccgcaactcctgtccccatctgcccagttccccacctttctgacccttcgtgttggttgtttctgttgcaattttttatgtgcccttaagaatgtgttcagatggaagagaggaaggttgaaggtgcaggaaagcaggtaatcaatagaacaggaccttactggaccaggagaggaaggactcaaagcccaggtagagggaatcactttgactgctaggcccatgaagaagacagccaatatggttgcacctttggttacatttgtagaagggcagccagaaaattaagggcatgatggcacttcttttcttggtgcagagagagactggttcatctgagaggaggggaggtatgaagtgatatcagccagcgtttactgaatgcctatattttgctaaatactttgtgtaattaaatcatctaatctttacagacatcccatgagataggtactcttgatagccccattctgtaggcaaggaaactgagggttagagaggttaaattacttgccacttgtcacacagctaataaagtagccaagcccgctctcagacccaggtctgtctgactctaggcccatattcctcccatcatgttcttctgcctccccctcttctcctgaactcttctcatcttaaggacttcattcttccctcctaagctctggtaatttaatatgacagtctgggagttactcacttttatggaagtgccgacacatttcacagacctcttgcacagtgtagttgactttcccagaagcacatctctctggagcgggaggcagcagcccagaaatgctgtctcaggaggaaaattgacatttggagttggaggtttctaagtgggatgcagaccagtgctcttcagattgttctatgctatgaccttttcccgtggcgcacattttctccactgtagagatagcgagggcttctgtattgcagagagcactgtgctttgaagggccagctttgtaatagtaaaagaggagaggcaaaggggagagggccagcaggcctgactccttggcggcagcaggaattgggctccagtcacttgcttaacactgagaaaaaggaaagaagacaggtgtgtttttgttcttaagtctcttgctttctagtggagaacattaaattaacacccaaaaaacagagaatgatgaaacaataaattgtgaggcactatgtagtaatgagctcagcggaaggaaagcccagtgaatactagaggagggattttagccgcagcttgcagaaaaggaggcaggcatcctgctaggaaaagttcatgtgctaggaggaggttttgtcttcaccagccttcattttcaaaaaacaattgggaaattgtttctggctccttgatgttcttaaagtttccccagaactgtcactttgaggaacaatcatatggattctaagagaaagtttttaaaaaattgccaggcttttcacattttaggattaaaagggaccttagaggacatcagattaaattcttcacccaatgcaagaatcccttctacagcgtctttgacaggtggttgtccagattctccttgattgcttctgctgacagggagcttaatacctcaagagaaacctcttctgctgtctaacagttttataaattttattttattttattttattttttttgagatggagtctcactctgttgcccaggctggagtgcagtggcatgatcttggctcactgcagcctccacctcctgggttcaagcaattttcctgcctcagcctcctgagtagctgggattacaggcgcatgccaccatgcccagctaatttttgtgtttttagtagagacggggtttcatcatgttggtcaggttggtctcgaactcctgacctcgtgatctgcccgccttggcctcccaaagtgctgggattacaggtgtaagccactgtacctgaccaattttattttcttttttatttttgagagagagtcttgctctgttacccgggctgcagtgcagtggtgcagtcctagctcactgcaaccttgaattcctgggctcaagcagtcttcccacctcagcctcctgagtagctaggactacaggtgtgcaccaccacacctggctcattttaaaaaattttttgggagtcagggtgtcactctgttggccaggctggtgtctaactcctggcttcaagcaatcctgccttggcctttcaaagccttgggattacatgcatgagccacgcacccagcaagacagcttaaatagaaaaccttcctctattaaaccagtatctgtttctctgtgacttaccatcgttagtgggcctcccagatgcctccagtattcccttggtaggaattttttaaatccataggccaaagcggtacagaaaagatgcagataactacagattggttttggcatactaataactccctgattgattccacaaacatttatttagcaactcctaagctgtgtgaaaaaactagttctgcctcaggtttggatgtccacagaagggcctctgtgagctatccacagagtagtaacctgctccaaggagcagatggcacatatcttgtccctggcctcctagtcccgggctgcacgccagctgatggagaggacccagtcatccaacatggagacccggctggatgccatgaaggagctggccaagctctctgccgacgtgactttcgctactgagttcatcaacatggatggcatcattgtgctgacaaggctcgtggaaagtggaaccaagctcttgtcccagtgagtatgactaaggtctcgttccaaggacttcgacgatttactacatcccacagggcatcctagtctcatttcccttgagtcaaataaggagtttattgaataccacctgtgtgcagagcagtgtgccaagcactagagtccataccaagatatataattccatattgtgattctaaatcgtgtagtctatttgggctctcacaaattaaataacagtacaaaacagtactgtgccaagtgagcagtgaaaataggggctagagaagtcaggaggagagcagtcacgtcgtgacagacctgttaattgctggaaatgtttggtttgatgagggttagtgagcagatggtccagtatctcccaggtgtctgtttgtaatcatcccctgctcctccctcttcagtcacctcccagcccatacacacacacacacacacacacacacgccttcctttgtgtttaccacaggtgtcaacctacccattcaccatctccctgccacacttttgcacagggaggaggagaccagaactttgtgatacccacaagcatcttcatcataccccagagttcacatgcatgcggtgggcagctgtgccttgtgagcagcagtcagtaaacaggtgcttggagcctaacctgccaaagagggagtcagaaatcttctcagcccatagatcaactattgaaattgttagccaaatcgagtaactaatcatagatatttgttttacatattggatcttccagctgtattgaagtcctgaagccttcagctgccatcagcactgacatagttctacagtctcccaagggtacagggttagactggccttagtttcactctcttcagcctgaggataataatagctaccttgcagtattattgtgagaagtattgttaatgagaatgtgtctgaacatgctttgtaaataggaatatcatctgttaattctagagcactgtacagatgtataaaggattaaatgtataaggagaagagaaaaaagagaaaacattttaatccttattctctaccagcactagaataagagctttgcatacatcatcatcttgtcgtctccacaaccctgtgaggttaacgctgtgagactaacttgattttacagaggaagaaattgaattttgaaaagataaaatttgcttggttagtaaggtggacaggaactgaacccatctcttgcactctactgcctcttggcccaaaggttaacatggcacttacacttccttaggttctcccaacaggtgttggagtttgacaaaggtccaatgtcttctttggtcttgggaaatagataagtgattctgtgtccctgggatgaagcatatggagaaggaagatctaattacccagcaacatttttttttttttttttttttgcagcgatagatacctgggctgaatctgctctacactggctaggtgtgcacacaggcacttacagttacagttgcatcgactgatttcccatggggtgttcacattaaaattcatcttttttgtggctgccctcacacctgtgtttcccgatctgaatctttgtctattttgtgtgtgtgttgcacgtgtctcagctacagtgagatgctggcattcaccctgactgccttcctagagctcatggaccatggcattgtctcctgggacatggtttcaatcacctttattaagcaggtgaggcctccaacattctgtctttctctcctccctcagctgccagttcacaaggcttaaggggagatacaggcaatatcgccattctggtgagatcagctttatattccctggggccagatttttcatcctcaagctctagtcttctgtggcttctgaaagatttgcattttgttatattctcagggcctgcactgagatggaactggaccgtcagaactaaatatgatcaaagtagaattagattgtcagtgagactggggataaagccagccagtcaaccagtactagccctgagtcttttgaccgacttcctgagctctctcttctttttgtatatatataaaaaaaatttgcatttcatttgtaaatttgccttctatttacaaatctgcaaggtagcctgtttggattgtcagactaagttcagtgggtaggagagggtacttctggttttaccctcctttcttttacacaaaggagcagtgtcaattcagaatactgaactaaaaccaatgaataatattgtatctgctgccctagaacttcagctatcattggcttaggacattgggactccccgacactggacacaagtgaaatgaccatgtgtcaaggatattataatggggactgagaagaaggattagagtaaaaggcttcaaggtcctttctacctctcaaagtctaagtgtgtttagggggagtgtgtgtcaggggaggtacatggagataaaatgagatcccagtatcagtaaaatcctctgcttttttataccccactttctcaaactggaacccttattttgataaaaagaattaagcttttagattttgaggaaacacaattaagtggatactataatctgagattaaggtatccatgccaagggaatccctggcacattggccagggtagccgtaaaccagataccactatccacctagcaacagctgcccaaatgtgaagcagagagagcttcaagggctagcatcagatgctaagcttctatctttcttgggccctgagcttctcaattgatgtgccatctctgggtctagattgcagggtatgtgagccagcccatggtggacgtgtcaatccttcagaggtccctggccatcctggagagcatggtcttgaacagccagagtctgtaccagaagatagccgaggaaatcaccgtgggacagctcatctcacacctccaggtgtgagtaaaaaaccctacacctccctcccttcacttgtctgtcctcttttctcctcttattttaagtcttccaatcctactctcctttgcttatattccaagctgttggttggcttcttcattcatcacctcttccacactcctgccagaatttctcccatcattcagacttgatcatgtcatgctcctgcccaaaatcctctgtaactctctctgccccttaggttaaaatgaagattttcccagtcttcccataccagggtggtaccaggcaaaattagatgctttctcacatgggcccagtagtctctgtacctatgataattatataaaatactggatttttattatctgttgcccattttgaacatagagcccccttgaaacagagaccaatcattgttgtatcccctgttttgatttaagtagaggctcaattagtgcttgttgaatgaatgctcactgaaccgacgatgcactgtgggtgatttgtaagaaatatcacacaggtgtgagtttggaatatcagttcaaatccaggctcttctgcatactaggtctctgccatcagcaagtaacctagtctcttctggcctcagtttcttcatctctagaataggttaatcaccttcacctctcacactgtgaggatcaaaggagattttaaaaaggtccagcatagaggccaacctgggttaggtattcagtaaattcaggggcttttttcctttgtttgtttgttaagactcttatcacatcctaaaacattttaccagatactgagaccatatgacaaatgaacccattggagcaatgtttctcccgtctccgctgtttttacctcacttccaaccaacctacaccatgtaaggaagctggactttgcaaaacagtggtggcactcctgttgattctcttctgactgttgttcacttctgttttttagacattgtcagaatgttgccagaatcccccaccagttcgaggggaagtcatagctcccagatttgggagtttatagtggccctgtcttcactcagctatgctcccaacttgtttttccccactaatccaagtaaaaagaaagcacaattatttctttgcaactctgatttctccttgtcacttttaaggaattttcagcctcagctttctttgcttttcttttttgagacagggtctcactctgccgtccaagctggagcgcagtggcatgatcataactcactgcaggctcaagcgatcctccccatctcagcctcccgagtagctggaatcacaggcacactccacaacacctggctagttttttttttttttttatttttgtagagacagggtctcgctgtgttgtccaggctggtctcaaactgttgggctcaagcagtcctcccaccccagcctcctgagtagctgggactacaggtgtgagtcaccatgcctggtctagcctcagctttcatacccagcgagccaccaaggttgattaaggtgagagggacattataaactccagatagagaattctgattttcctgtaacctcacatctacttctctggtttttttttttgtctctgaattcagagtggccccagttgcctccctagggatgataggggaacatggcatttcataggagccaatactttcagcccacagctgtcaccagaacttatatgctttcctttttgggctgagggatacttagtgccctctgttagactccctgggtaccatgtgactaaccaggaagcccatcagaccctctggaaagacagccacagaatgcacccaagacatggcaggtggagatgtcaagtaccaggattgtaagattccagagaatgattgtagttattttgtttgttcataataaaataagtttatagtcaaagactttaaaaatacagaaaaacgcaaaattatttgcccattatctcacctccagacatacccactgttaaacattaaattgaatgtcccttcagtatttttatgcatatttttaacaaaatcgggatctcattatatatactatgtgtaccttgattttttttaactgaataatacaccttgaacatttctccatgtcaaagatttttctaaaagggtagttctaagtcttttttgcaacctagacacctttgaaaatctggtaacaagtatatactctcaccagtttggaaaaaataccacttagttggcaaactacatagaataatttctgtatcattcctggggttcacaaatactctaagctcatccctgaatcccaggttaagaatctttaccctaaaacatgacttttaataactacttaagattctcatatgtataaatgttggctaatgtgaccatttggattactttccattcttttttaagtagtactttaatgaaacgccttgtcagtaaatcttgcatagctctctgattactgtcttaggataaattcctattagtgaaattgctgggtcaagagcatgcccactttgaatgcttttgagactgagctccagatcattatttgcttataatctgtgagtgattgttttaaaccatttctaagcatcatcttgctgttcagtcttctaatctccctctctcttctttctccattgacacagctccaaccaggagattcagacctacgccattgcactgattaatgcactttttctgaaggctcctgaggacaaacgacaggtctgtggctgccttttcacatttttcatctgggctcttctgagataattctcaccccatgcactctttgctatgcagagagcacaaatccagcaattttcccaagagttcttcctcttagctgtctggtctggagcccaggagggtggctttgctaaggaagacccagggaagacctatgaggggaaaccagctgggtcttagatgagagcagggcccttcaaactttttcctctaaagggccagagaataaatatgtttgactttatgggccatatggtctatgtgatagctactcaaccttgccattgtagccaaaagcagcctcggccagtaggtaaatgaatgggtatggctgtcttccaataaaatcttatttacaaaaacaggcaacaggcctaatatggccatagtttgccaactcctgggttacagaatcaagaataaggaagaggagaccctgtggctaccctgagtccaaggagtccaatatgaatgggatttcacactaaatcttaggtttaaaggttctctgatggagattctaaacatcttccttcccctgttcattaactgtgacattatgcagatagctctgcctctgtgaaccttagtttcctcacctgtcacatgggagcaacaacatctgccttgtttacctcacaaggatgtctgaggaaaaacaagatccctgtttcacaaataaggaaactaagaatcagctgggtggtggaacaaacactgacctaagagccgaggggcctgggactaagtattctccctgctgctggctggacaagtgtttgtaacctctttttgggtctcagtttctctttctgtaaaatgaaagggccagtttaaatgatctctgacagcccttccaatactaacattctagatttctctgagaaaagcccaagtggtgttaaaagtaagacattttagttctctgacaatctcatgggctcagtaagatgaaattcaagtgggatcatgtatgtacccagctcttggtagattctagagggaagaccagaagcatctgtggttctgtctgtccttgtctttcttggatggcttggctctgttaatctgccttcccggtccttgtttgaatgtaagctgaaagctcattccgtctgcttctctctgtgcttttgctttctgccggcaggacaagcaccttaatcctctagacctgcctgtcactgtaagtagcactgccatgtggaaagggccccagctcttgcaggtggggaagtcaaagctaggcaagaatctcatggtctgatctagatgttcagggcatgccaagacccagggaaaggttgtgtgctgtgaatctcctttgtcaggacacttagggaagtactgcagattagagtcacagaaaggattaagggggtacctgccccagggagtgtggccccagccttcctttataacttgcctttgcatgggtctgtagttcaactagggcagaccagactcagaaacagctcgtaactttgatctagacaataccatggatgcgtcaccttcttacttgctttagtggaagagaaaaggtatccgtgccctttttggactcttactagaccgtgggaatccgaaaaggtttagacaatcgacaaaagggaatttggatgctcatttcttcattatagggagctttagagaggtcagctttgcgaggagatgaaaggggataagtgcctccccctgacaccacagagaagcttttggtctaagacctttatattctagctgcagaccactgtcaattacccaccttatgagttgtccacagcaagatttaatctcagtcgacctcctatagttaccagagaagtttctaggccactgtcctcctctgctagccagtatgtattcagagaatgcaaagtaaaatttaatgttcctggcagcattagccatttggaatatggctagaaatccagaagtgtgacagaggggcctttcagctctgagaaaaatgacacagagctcacagatactactccataggagaggtgtgacagctccctcaggcccactgatttaggattctctataaaattaaatgaaggcagcagtttagaaaatgaagtcatggtaattaacatcagtaagaagtgatggtcgacactggaaggaggagacaagaattatgaaaagctgtcagaaaaattaaaggcattgtaatctgggaccattttgtttatgggaaaatagcttcacatctcagtagctcctcagggtatcacagtgtcacaacacagaataatcactgatgttctttttgatgaagccgactccttagcagtgattaaattatcactgtagtcacttcagaaataaatgtatataatatgtctttaaaagatttgcataagaatggtcaaaataatgattctgagagaacccttaaagctttgctccctggaagattcatttatgtaggaaacttgatttcctgggtgggctaaataaataaagcataactatcaaagtctggatcaaatattataaaaaaggtgagcctgttataaaaaattacccaaaacaccagactcattgttctctaagccagttagaacggaatcctagactacttactgttgtagagcgtccagaccccagccgtctgctgtagggtgggagggggttgctggaccaaagcccttccttgtttggagtcagtgcttcactagagttccttctagccttagcagtggggtctacctggcacgatgcatgtggcttagaaaccatcacactgctctgtgtccatgtgcaatgtccttgtgacacaagcgtctcatcttcaagcagtcctcatctctctttgaagacagtggagttgattgtgccattaggaaaggaaatcctatttgaattaatttgcactcacaaaaatagggaatgttgcagagtgtaaaatacatctgatggtcagtggattttcgttcattcacccacttttcatttgggaggaaaaaaatttaagaaagcaaaaaaggcccagaattttgacatcaccttcctctcgatagtagtcacaggtgtgtgcctgccaccctgccttatatttgcttattttcctccacaggatatggcaaatgcatttgcacagaagcatctccggtctataatcctgaatgtgagttcctggaacatgctgtattttattactattaacaacaattattactgttattgttaatatattattattgaaattattaatgagtgaggaggacacacagaggaaccttatcaataggtaaatacctcttgaactgaatagctttttcccgcgatcctctgtgagcagagttgcctctaggcagccatctcaccagcaattgcagtgcgtccagggagggaccaaggccagctctactgtttgttgccctgcaactccagaatttttatccagagggaatatgttaaaataggcacaaagggggaaaataactcatccaactgacactgattaaaaatctgaattgtgtagggcactgacagaactaagtaagcaagtgtatttgctctcaaagaccttctggcctggtaggaaagactagtgatcatagtggggtgtgatctgggtttgtggtctaggaaaggatggaggaggaacagtgatttctgccttgaagaagagtgtttccggaaacttttagaggaatgtcttcaggtgacccttagaggatgagtaggcagaccgggaataacaggaatttcagtcagagggcagccagaacccagaaggagtgtgtgattaggcacagagcaaggagcaagtagatgaggaggctagagaggtagcgaggaccagatcaggaaaggttagtctcattcctaaggacagctgagggcatttaattgagcttgtgaagtaaccagatttgcattttagaaagagcacatgaaagacatgtgtttgctaaggggtacctgagggaggagagcagagcaggagctggcagggggatctggaaagaggtataaatccctgttaccacctgtggggtggagtagggctgatgttgggaggtggggccggtgggagtggaggaggagagccaaggatctgaattaaaaggaggcaactttggccggacgtggtggctcacacctgtaatcccagcattttgggaggctgaggcgggtggattgcctgaggtcaggagttcgagaccagcctgaccgacatggtgaaaccttgtctttactaaaaatacaaaaattagccgggcgtggtgataggcgcctgtaatcccagctactcaggaggctgaggcaggagaattgcttgaaacccgggaggtggaggttgcagtgagccgagaccaggccattgcgctctagcctggacaacaagagcgaaactctgtctcaaaaaaaaaggaggcaactttatcaactgtcagaaacaagggaaacctgggagaccacagtgaagggaataaaatgaaaaattagaagtcaagtttaagacttaagctaaacatggactttggagtctgccattttccaatctttgatcttgagcatttcacataacttctctggacttcagtttgctcatctggatatgaggactaagtgagctaatataatactgtgcttagcagggtgtctggcactcagtaagcactttgctcgtattggcagaacaggatgcagaggtgataggattgaagaagtaagctctgagcacttgtgaagctgagcagtcagctgctctaaaatgcagagtctgccagacttcaccttgcagaaccagcttctccctgctggctgcttccctggtcacacccagctaccagcctggcaggaggggccccaagcccacaagtgacaggagtacacaggttcccacacattcctgcctacactcctgagcagctgtcctggtcaccctcttctgcatgtgtggggatgagtgcgcccttctgaaggaaatttaattatgtttgagacttactatttaatcgggttagaagttcaactcatttctggacaaaccttgtgaacaagtaaagatttcactatagaaggcagttcagcatcaggactcaggacttaagtggcctggcaggaaatggctaatgcatggtcactgaagtccagggatttcactgagtcaagccagagaactaagaccctgagatacttgacagtcaagtgagacttcaggtaaaacctcaaactgtcactcatcagactggagctgtacttctttaagccattgatgctaggataattaattaccttcctgccctgatgtttcttaagttggagaaagagaattaaagagaatgaaaatcagaatcacattaacttccacctctattcaaagctgttttataaattagggagaagagtgaggagagaggaataggatagacgaaggtagagagagggagcagtggagaagaaaacctcagagtgaggcaaaggaagaggtgtgaaggggaaaagaagtggcgatggcagggaagagcccctggccatgagagagactggggggagtgggaaggaagggaagttatggggcagggggcacagagcagagaacaagagagtaaggctagagagatgaaagaaacagtgagactgagctaagaagagcgatctcacgcttaagagacagagggcgtgcctgtgacagggcgggagctacaggactggacatgatcaccgattcagggggagggagggatgcaggcagaggcctaactccagcatgttagcatgtgctatggaagtgctgtccacaatggtggccaccagtcatgtgtagtactttaaataagtctgttgtggctgaggacctaatttgtaattttaatttcattttaaatttaaatatccgtatgtggctcatggctgctgtattaggaagtgtagatctagagaaacagctagaaaaaggagagagcactggagtcacagtaggggaagaggtctagagcaggaccgtccagtggacatagaacccaaaccatgcacatgattttaaacattttagtagcagcatgaaaaaggaatagggacattaagttcaataatatattttattcagcccatgatatcgaaaacgttaccatttcaacaagtaataaatatgaaatattattaataagacattttacattttcttttttcctactaaggcttcaagatccggtatgcatttacactcacagcacctctcagtttggcctaacatttcatgggcctgggggctaccaaactggacctcacaggtctaaagagattgatctagagtcagagcaaactctagggagagctgatccaaagttagaaggagctttaaaaagatactgagtcagatacctctctaaagtcagagcgctctagagcattgctattcagtagaactctgttaatggaagtgttccgtatctgcattgctgtagccgctagccacggtgactactaagcacttaaaatgtggctggtgcaactaaggaaccaaattttcaacttaaatttgttttaactgatttaaatgcaaatagctgcatatggctagtggctgctatactggacagcacagccctagagacagagctactgagtagggaaattgaaggacatagtggtggtacatgtggaaaatggaggagagcctcatttgggcaagaaagaaccaagagggacaggattcataatggtgggtgagacagagggagtgacaaatacaagggagcaagaagggaagcaggatattgtgggagtgaggacaggatggtgagagacaggaatgtaatcaagggttgatcagctaggacagaccgagggagacatagcatgcaagagaaagacagagacagaacatgagacaggaccaggggacctaaagtggggtgtgggcatcagagggacaaaggaggaggtgatgaaccgacaggggaatgtgggggcacagagacagtggggagggagagtcaggagggagagggacatggtgtgggcggcacagggagcagggacagagtgataggagagaggagaggacaagtgagaggaaggaaggaaggagagggccgtgggagggagctggtaggagagtgaactgttcctcctttgtgttgctatctcagtatcattgaaagaaaatggcctttcccaaagcctctctgctgggtgaagccatccaaaacattttatttttctaagggaaaaacaactctgcctccatgcacaccatctattgttttgcatttagtaggcctgtgaaatgcctgattggaggaaggtccagcccccaatgttctgtatcatagccttgatggagtagcctcccccatttctggtgtggttgggtatagcccctgccttcactctgcttcccctgcccaggggaatgcagaggaagggatggcgcctttcaggcctgcagtgagtcatctctgcctgaaccaagcccattcatgctccatcgccttctagaatatgaagtcctcgtgtgtgggaggaaagctctgttcccttcccaacatacattccttttccttagcatggatgtggcccttcattaaaagagatcagttcagtcccctgctccctgcctgtgctttttctagcatgtgatccgagggaaccgccccatcaaaactgagatggcccatcagctatatgtccttcaagtcctaacctttaaccttctggaagaaaggatgatgaccaagatggaccccaatgaccaggtaggtgctaagtggggcagctgttttctcatggctgtggtgcagtccagccttagtctatgtgccaggcactgtgcttggtctttgtctgcagaagtagtttgcatctgccctagaaaatctagcatgatctgcaccatgagccaagcccatttctgtcctgctgtggtagaggtgatgcctcctaagggattgattggggccaaagtttggcccagaaaagcctgacccactgtttcttttccttgctcccttggttagccgattcacctgctgactgtctgtttcacctcgcaggctcaaagggacatcatatttgaactgaggaggattgcatttgacgcagagtctgatcctagcaatgcccctgggagtgggaccgaaaaacgcaaagccatgtacacaaaggactacaaaatgctgggatttaccgtaagtacctcagagcatagacggtggtaggccctctcccctgatgggaagtcaatggtcccacccagacagagctctgacaaccaaccccatggtggccctggaatagatgacagttaggaagctggtggagctttaatgcttgctttgctttgttgatggtgagtctgtgagtttatgtgcaaagtttggccctgtgaaacgaatccatctgtaggggggttgcggtcagctagagtgggtagagaggggacctgtcctcttacccaaactgctaggttctttgcaaagctagtgtgaatattttgtgatagagtagggcttgaggatggggttaactggaagaagtatttcttgcgtacctactcagtgtgcagcagcatgtgaagtaggttctgggatgcatggtgaggcagccaccgtccagcactcaagagctcacagttcagtggtggtgatgggtgtgaaaagagctaggacagaggtgggtgctgagtggtagcagcatcaagaggagaggcgagagggcatcccctcaggtccctgcatacacggagactgccgcatctcaaattgggtgtctttatttctctagaaccacatcaatccagccatggactttacccagactcctcctggaatgctggccttggacaacatgctgtacttggctaaagtccaccaggacacctacatccgggtaaaggcaggggagctggccttctcagtcctggtgccacatctcctgccttcctccttcatctccctaatcctccctttctcttcccccgacagattgtcttggagaacagtagccgggaagacaaacatgaatgcccctttggccgcagtgccattgagctcaccaaaatgctctgtgaaatcctgcaggttggggaactacgtaagtctctgcagctccctcttcttcagccattccttgtcatcaagagctcagtgagactcaaaattataaacagttacatgtcagtggggtcgggcgtggtggttcacacctgtaatctcagcactttgggagactgaggcaggaggatcacttgagcccaggagtccaaaaccagtctgggcaacatagtgagaccccatctctaaaaaaaaaaaaaaaaaaaaaaaaaaccaaaaattagccaactggtagtgcatgcctctggtcccaactactcaggaagctgaggcaggaggatcactgtgtcaggaggtcaaggctatggtgagcatagtcatgccactgcattccagcctgggcgacagagtgagactctatcttaaaaaaaaaaaaaaaaaaaagatgtcagtgggactagacaaccttaggtgggtttttaattttgttttttgttttaaatcactgcatcagctgataattccatcttatccttatttatgggaatcatggttgttgctttgtttgaactggcaatttgaatcatattccaaagctaccccatgcctgtgggtaagggctggctgagtctgtaacagggtagagggaaggcaagaaaatgcaccctggagaagaaagctaaggacgtgagaaacgcccatcccacgctccctgttaattgcgcgccttaggctgcttttgttcctcgggactttggtgcaaagtttccagacatgagctcccaggcccttgtggacagaggcttcatcttctccctgttttttcacttccacagcaaatgaaggacgcaatgactaccacccgatgttctttacccatgaccgagcctttgaagagctctttggaatctgcatccagctgttgaacaagacctggaaggagatgagggcaacagcagaggacttcaacaaggtcagtgtctccgggctgctctgaggcccacgggaggagaccatcacacgacagcctttgacagctggctggcacctggagaatccctgagctggaaaagcagcttggtctgcagaactgagtcacaagactgaggcactggggagcctcagccccatctggttgttgctccctctgtgaccttgagcttgtcttccacttggtgccgtaggccctcatttgtccattgaagttagcacctgtccctcccgtcctccagagaggtcaggaggataagcattagaagactcactgtggtttattgagtgcttactgtgcaggtactgctgtagttttgtgaactgggaaggttaggagagaagagtggactggcatgatgtgcacaccctgggtacttaatcgatagttatccctcggtgctttcagtcctcactctatgcagagcactgttgtgccaggccctcaaaagctgatcatctaggggtcgagtgttttgaagttgatcatctcatcataaaaaatttggaaagtataaagaataaaaagttacctgtatttacaccatccagtgacaaacatttttgttttcctctagtcttttttatcccctacaggtttttccttcattagcaagatcatactgcgcatgcagtgtggtatcctgttgttttctttaatagttgttttaaggggaccaatgcatttttttaaaacaccacagcgtgccagaactgcgcttgcctttctattcttttgtttgtttttttgagacagagtttcactcttgtcacccaggctggagtgcagtggcactgtctcggctcactgcaacctccacctccgaggttgaagtgatccttctacttcagcctcctgagtagctgggactacaggcgtgagccaccacacctggctaatttttgtatttttagtagagacggggtttcaccatgttggccaggctggtctcaaactcctgacctcaggtgatccgcctgcctcagcctcccaaagcatgagctactgcaaccggctggtatctcatattctttatggcaacacctatcaggagatgtgtcttcctttctctcggtttagagatgagtagatgcacacctaaggatgttaagtgacttgctgaagggacagagtcaagatgtgaacccatttctttctgactacaaaaatccatgctcatttcccccacaccattgaccaattgaaatatatgggaaataaagcatctatcagtgtcagtcatgtgacctgaataaccatctaagaaggtataccttactcacccagcagatgtctgtagtgcctgccctgctcaagaccctggggcaggaaagagccttggtgctccataataggcctgtccatttctcaagagtagtggtgtgagttggctgggttcttctcctcttaggttatgcaagtcgtccgagagcaaatcactcgagctttgccctccaaacccaactctttggatcagttcaagagcaaattgcgtagcctgagttactctgagattctacgactgcgccagtctgagaggatgagtcaggatgacttccagtccccgccaattgtgtaagttccatctcaggggaggctggcgggggaggtggctgccagctctgctttccttccagagctccactgtccccatgaccttccgctcactccagtgtgtgtccaccccagggagctgagggagaagatccagcccgagatccttgagctgatcaagcagcagcgcctgaaccggctctgtgagggcagcagcttccgaaagattgggaaccgccgaaggcaaggtgagaggagacggggcaatccttggtgccgggaagagcctgcctggatggccccttttgtgcccaggcctttcccagtactgtcgttgctcacctgtttggcttcccttgtgttccagaacggttctggtactgccggttggcactgaaccacaaggtccttcactatggtgacttggatgacaacccacaaggggaggtgacatttgaatccctgcaggagaaaagtaggttcatttctctgttgatgtgtcatggttgctggacttgtcaggagacaggagttctagtccagctgtttgtagctgatcatctgggcttgtacctgttacctctctggacctgtttccttatctgtcagcgatttcctctacctggcctactcggtggggtggtttggagaaacaatgagttcacaggtgtgaatgtattgtgtagactgtaaagggtggtacatgactaagtcgaaaggcagtagttaagaggagaagctgtgaagccagactgcccacattcaaatcctggctttgctcctaattaacttgaattctaattaattgcaagttctcccctctgccttggtttcttctcctgtaaagtgggaataatagccacactttcctcctaagaggattgcatgagtaatgtatgcaaagcacttagaagagtggttggcaggtagtcagcataactgttagcagctgccactgctgttggcgatgatggcatcatcatcgccattattgtgaaggagaggggaagggagtcaccaaggtcccgttccttggggatataaatccaagagccctgaagtgaccctcagttagctttgacacagcctcactgggctgtggtctacaggagtgaccaagacggagggaacagtacaaggccatcctccccaccaccctcactgagctcatacagcagcccttggagtttggggctgaggcttcctatgcatctgccccagtacctcccttccagcactgatgtaggcactgaccagcttgcagcatgaacttccagagactaattcccatcatttatcagttcctgttgcagacattaaggccattgtcactgggaaagattgtccccacatgaaagagaaaagtgctctgaaacagaacaaggtgagtagagaggccagtttgagtagctggcccagtgatacttggagagtgccattggtggtggttttttccaggtgcattcttggcatcttcccctctctattcctgaatgttttattaagaattttgaacatacacaaaaatagatggaacctctgtatacacatcacccagactcagcaaccatggccagttctgcccatccacttgtttctctcctttatcgctttgaagaaagtcccaagtatcacactgtttcatctgtaaatatttagtgtacatcgtatagtgtataacattgccaccagtccattagcacacataacaggaaatgaaagtagttatttcagatcaaatattccactgatggtgactttctaccaattgtcttataaatgtcataatttctctacagatatataaatgtttatatggatacacacacacacacacacacacacacacacacacacacacacacccccatacccatcttgtctaaaccagagtctaagactggtcttttaagtttcttaattcataagttcccccgcccccccatcccccaccatcttttcctttgcagtttattagctgaagaaccagattgcttgtttggtagtttcctagcatctgaattttgctgattgtttccccgtggtacagtttaacttgttcctctgtcccagatctgtacattggaagagggatctagaggtttgatccagttcaggtttaacttttttcctggccagtgtcatcagtggtattatgttctatcaagaggcacataacgtctggtggtctctccttttgtgataattagcagactgttgaagctcagtgcctcattccatcagtcaactaaggtttgcaaactcatgatattttgatgcagtcattgcttttcatttatgagctgaaccatgaaacttgcccttatctactattggtttcccagtggtacagtttatataggaaacgagaataaatgctgattcttcttttatgtacttactttcaaaataatgagttagttccttggtatcatgcaacagtgaccaattttgtgtgtgtgtgtgttttgttttgttttttaattgttaagacattcctatgccaaatacagcacgatagaagttgttagtcatcttggtaatataaaaacttttaggataacttacagtcatggatcgtgaccttccagggttctgagtgttgaaaatgacttttttccaatcttaaaaatatcacaacatctttgatgtgacttgggcagggagtgggtaagttaaggttgatttatgctgggcctcatctccagccacacttgtggccgcctaggagcattgatgacattcatctgaatcagcatgtttggtgatgatgccgagtcactaggactttggccaagatcttgatgtgcagaccccaggctgttccatcgctctaatttaaaccctttctccttcaggaggtgttggaattggccttctccatcctgtatgaccctgatgagaccttaaacttcatcgcacctaataaatatgaggtgagcagtgtggcgctgccttagacaacagagctatttctgtaactcttcagttggtggcaggaatgagcaaaacaggaaagtcccctgtggtgggtggctgcagtgtatattgaagcctaggaaggctttgagaagaaggtggcatttcaataggatgggaatgtctcaaaggaggagctgtggttgggggggcacccagatgaagcagcaggtatcattacataatgctggacctgaggttcctccaggcgcattgggtggctgccaaggatctgtcacactctggattgtttatctgtgagctgggctctccacattactcttcagcagcagccataggttgtcattacaaagataaggtcaactaggaatgagtcatttacctgggactgggaaaattctccccttttcagtttctctgtggtcagctacccaagagaacttgacagatccttcctcctaggggctcctggtcacatgttgtaatggatccagtgtggactttgaagccagatggaactggtccttctgacaagggccctgtagttccatctgcagcactggaagatactagatattaaatgagtgattgcatttgagaccctatgtgcctggtgagctctgagagccatcactgggaactagaggtgggacttctggcagaggagacacttgggcagggcctgagctgccgctagtggaatttggttgagaggaaatgaagaacaagcaagtggggaaccaggtgagcaacggtgtggaaaaaggaaaatggcagcagaggaagcaggaagagtcagggagcggtgggatcagaaggcttcctggtcaccccctcttagcatgagacccaccagttccatttctttagtatttactctttaatatgtattgactggattatttttaattttgttttcgggggggcggggcacaaaattgagatcccacagtgacttctgtttgtgtcttgcttcttttcacctaatacatatttcccttctctcgcttctgattttgggtaacttcaggtagatgatgccccagtactcagatctcattttgctgtattcgtttattgcatttttaggttctccttcatattattgtaaggagttgtaatataaaaccccttataaaaaccagatctcttgagaaagtgaaggatcacctcctaatttatctttgctatcattccaaatcagttttgcctatactgattagttccaaaaggaactgttgtgagccccatcagaaaagagaccttggcaggatctcctgctgaccaggggtcacgatgtgacattttgcaacttgctccccacagtactgcatctggattgatggcctcagtgcccttctggggaaggacatgtccagtgagctgaccaagagtgacctggacaccctgctgagcatggagatgaagctgcggctcctggacctggagaacatccagattcccgaagccccaccccccatccccaaggagcccagcagctatgactttgtctatcactatggctgagcctggagccagaaacgacggtacccaggagaagggattttgggcccaggagaaacacttacattctggtgccttgtcttttgcttgtacagaatctgtagtgattttggtggccagtaaatgccagccatttctcaaacccacctcggaccacccagagtttcctcttggtccctgtctactaagagtcatgaaggcagggtgctctgcccactccatcaccatgaagcctgggattgggccacgaggaacaaacagcagatgcccttgccttccagtccaagaaactgcttcttgaaatggatttaacaacagccactcaccttttcctcctgagcctgctctctgatcagctggatccccacgtgagcaacagctggcccaggaaaggctgcctgcagaggacaggtgtgttgggcgtgttgagagccttgaagtgactacctgtatcttagatctgagtacaagcctgaggcttttgcttttgtcttttttgatgagggctcactccagcttcatatggtgccaagacgttgctgcttctgaggttggctctaacatctctggtctttagagccaccagatctctctggcccatacagatatcagagcagacggaaatttctccctgcaagcgctcagtctcatcccagcaagtcaaagacctcctggccaagtcctgccctcttaagtctccaggaacgctgcagggaaaacccagctgaggcctgggcctagactgtggtgaggtcactagattctactgctcttcccccacattaataccttttccttcctcagagagaaatctcccctaacctgaattgcagccccctccagtttgctttcctttggccttccagaccccaggaagttggccttcccttcctagtgctatggtttctgccattggccatgatttcagggagctggctgaggccggctgaggccacacctgtgccagtggggcttccctggtgctgcagcacttgtaaaccacacacacagcctctctccctggacatacgttagcacattggcattcagtattggtggcctggcatggtaggtactacccaatgaagagtgtactatatattttcattactataggccatacttatacagacgtgtatatatatttatataagatctacctatcttaggatggaaccttggggaaaaataaaattgaggggaagtaaaaagtatgtaacacttccagttgtgagccaagattgtaaccagagagcagccaggagcttcctgtcagtaaccatgttttcaataaatactctttcatgtacaaa

SEQ ID NO: 1579 - DNA, 14698 bp, Homo sapiens
aaagagtggaatggagtcactggaaaaggcatccaaggcgagcaggtctttcccgtccttggacccgctgcgtttgtgcttgtgtttcctccgaaaaaaggaccggcgtgcagccgctgacagcgtctttgtggcgctattgtcatctttgacttcagacatgctgagcctcctggagaattcttggtccatcctgtggcacaggggacaatgctgggcagggccatcgagaccctgctgccctgcccttcctgcccttcctggtgagaaaagcaaaggtgggccagacactgggctccccccacactccttggcaggtctcaaggctacatctcctcccacgcccctgggaaccctcggtacatgctgcgggggtgacacaaacaccagcaccagggcaagctctcagagcaggcgattttttctactacagcatattcagctcggtgtcaaaaggaactgctaggacagccttcaattggtgacatgacgagttacgcttcctgccatagaagggaaatgatgcagggatgcaggctgcctcgaaaacatgctcagtgacaggagccagatgaaaggccacactatgcaatcccaaccacacagaagtccagacagggagacccatgggtatcaaaagtaaagtagtggctgcctagggctgagggctgggtgggaggacagtgggataaggggctgacagctaatgggtctggggtttgtttgaggtgacggaaatgctctaaaattaactgtagtggcggctgcacacacctatcaatatgttgaaaaccactgaatggtacactttgagggagcggcaaggcacgagtatctccataaatccatttttctaaaacacgttatgccttctgacccatcactgtgctctatacagcactgactcacactaggagcagctttttagaccagcacttttggcaaaatgtagagagcagaagctaagataagaagcagaatccctcctccagcagccctggccccagccccctcccatgggacagctccatggctggtggccctcggcgacccctgccccaccccaccccaggcccggagaacacttacacatatttgctgggaatctgcccgcgctggatcttctgggcattctcgtccagctgccaagccatccaggacccgaacgtgccctggggtaaggtgtcatccacgtagaggatgtcgtccttcttaaagctcaactcttgctccacatctgccagccggtcgtacagggccctggaccacagcacagaaggaacacgatcaggcggctctggccaccaaggacgaaccaggtgccttctgtggccaggcccctaaggctgccattctgctttgggctgtctccaaacttgatcaggaatcgccgagggtggtgattctcaaagtggggagccctgtgttttacataaaggggcaaagactgcctttgctcccctaacactgagggcgcatccccatcaaagaactcaccaagatctgaggccataacttccctttccaggtggcctttcccagttgcctccctcctcgaagcccaggcccggcccctggttcctacagactggaatctctctaggatggaaatatgtcatcttctaccctagagacagggagttgtaccgcatcagtgttctcatgctttctgcgatcttggatcttaggaaatgtgaagaaagctctgagctcctcctagaaagcctgctgccatccctaaatgcccacagcatttcatacagtagtaagggcactgaagatgcctggaagtccacacacactgcagagggatctgcaaacctggcttgggggacaccagaaaaagaggagcacagcacacaggaaaacggggcttgactgcctccaaattctctaggtcttaagccctaaagagggggcccagctggttctttaagccctaaagggttgttctaagtcacaatcatctcaacataaataagcgtgcagattgagtgtcaaggaatgatgatcatggccccagccttggggggcaagaaacagagagccattcaccaggaaaagagtctccagtgaaagcctctcctctggttccaaatctcccaccgattccccagccactggtacctgatgtagaagctgtcaccaggcaggcccttggccttcgtgaactcctcagggcggtactgcaccttcaggcggacgccatccctgggcttcagcatctccacatagacttcctccactgtcttgttccgcacgtccaggctgccatactgccagggatgggggtggatgcatcagaaggcagaagccagggggcagcttgggcacccgagaggggccagtgctgaccatacggcagaatttcaacatccctccttaactgagactctggctacctcccctctgcaggaaggactgagtcttcatggtctccccagtctccaggtcctgtgcatgctccctggacaccaggtcctctgccaagtggctgccctgcccttgacagcttatccaggaaaaaccctgttctggtgactggcaagtctgggcttttcagaatagggaccttcctcttgctgatgttgcctgtgcttttatttatttattttctgaaacagggtctccctctgtcacacagactgagtgcagtggtgcaatcacagctcacagtagcctatacctcttaggctcaagtgatcctcccacctcagcctccagaatagctgggacaacaggcacactccaccacacctggctaatttttttgttttgttttctgtaaagacagggtctcactatgttgcccaggccggtcttgaactcttgggctcaactaattctcccaccttggcctcctaaaattcacaggtgtgagccaccaaacccagcccaacttgtgcctttatattctcacaaaccatctcccccatgaggcaggagaccacagagaaagaccatcctctctcatcagaacagagtcctgcagctacatcacctgagggcgagcaccccctgatgcccagggcctgagccaaggctctgccctcaggttccctcaatggcctgcctggcttcacagggacctcctcagaagggcttggcaggattctgggtttacagggattaaaaatcaaccctggccaggcacagtggctcacgcctgtaatccctgtactttgggaggccaaggcgggtggatcacctgaggtcaggagtttgagaccagcctggccaacatgatgaaaccccgtctctacaaaaaatacaaaaataaattagctgggcgtgttggcgcatgcctgtaatctcagctactcaggaggctgaggcaggagaatcgcttgaacctgggaggcggaggttgtggtgagttgagattgcaccactgcactccagcctgggcaacaagggcaaaactctgtctcaaaaaaaaaaaaaatcaatcctgaggctggacacggtagctcatgcctataatcacagcagtttggaaggccgaggcgggcagatcacttgaggtcaggagtttgagaccagcctgggcaacatggtgaaactggtctctactgaaaatataaaaattagccgggtatcgtggcacatgcctgtagtcccagctactcggaaggctgaggcaggagaatcgcttgaacctgggaagtgaaggttgcagtgagctgagattgtgccagtgcactccagcctgggcgacagagcaagactctgcctcaacaacaacaacaaaagtcagccctgactggctcaccagatgagaggctgtactcctccgtctttggtgccacctgagatggcagcaagcccactgtgcaggtagatggaggcctggcctgctcagcagctcagaactcacctccaggatgaggtcccctggcacgaggccgtcaggacccttggcaggactgtcatcctccacctcggccacaaacaccccatgcaggttcccaccacacaagtgcaccccaagctccagctgggactttttgatgaagacaacgcgtggctccagggtcttcttgttggcatctcccgcaatcctttcaggaaaaaaacaaagttcctcaactgtgcacaaagaggaggcacaaaaagacaaagcagtggccaatgccctaaccgctttctgcctgcttcttggggtctcagaaccacagggagctgagaggtggcctctagttctactggctcggcgttcgggacaggatgctaaggtgcactggagatgaaggcaagaccccaggtccaaagccagttagcgggggcagtcaaaaccgtaaatcagtgcccctgctcccaggcccggctatcaatctcatgccttaaagatcaggatggcctccctcccatgtggatcacactcattttcctaacttagtacttcctaaggaaaggtaaagttggcctcactgtccagagcacagcaatgtattcagcaaatgtctacgaagaagcttctatagaccagcaactgctaacttgtgaagaggggccccttgccatcaaggcacttacaatcaaggaagggaagctgaaagtaagctgctgaacacatggagggagtgagatgggacagcgatggaaacagatacagggggcttcaggggagatgccagcccgggaggaaaaccttgcagcaggtaagttccaatgtgacagactctggtatagagaatgcagagctggcctcattctgtgagatgctgcccagggcttggtgaaggcctctcagtgctggagacacagctcctccaggacggcagagtgatcatgtcacaccatggcctggatggccctccctgcagccccaggccaggctggacgctgtgcagctcccatggagctccttcctcctcctgaactctgctgctccctcggcctggacttctctttatgcccactcttggctcttgcctgtcctgaacattttaatccagctgccacctcccctgccacactccagtgatcttcctgcctgctctgcggcggccggcagtgccctcccagcaccctgactctgctgcacgtgcccggcactggtctgccacctcattgggggaagcactgctgtgggtggccagagcccagggcctggccgggtgatgactgtgggaatgtgtccaaagacagactcagaaagcgagtgaacaagaaaaggagaagagaaagagaagatgcaggggaaaaaacaagtcaatagaaaacaggagaaaaagagaaaggaaaagagagagtagggaaggaaaaaaggaatgccgtgctcccggcccaactcctgaagacctggtgtgcggcctgcagcacatgaggccagctgcccagtgcccacgccacttggagaatgtgctcagccccacccagccgaagcggacacagggaaggctcacagcaacgtctgctgacctggagctgctctgcttggctgggggggtgctaggcccctcgtcctgctccatcagtgggtcgatgacagatggatgctccggggtggtggtgccactgccctggagagtggagtgggtaccggcagggtccaggtgtgagctggaggcggaggacaggagggataaggagcagtacgaagccacccagagccacccccactcctgtggcaactagatctgagctataaatggggaccaggtcacatagccctgcaccctgtgccctgagcagagcagacacattagaagcctggacccatgacatccacctgtcctctcccctccacctgtcctcagctcaggggccctctccaaaggcatctgacctcaggaagctgtgagcatcctgtctcttttcctctgcctgtgcatcccatctctcctgctgagcttgtggcgcagcactgcagggcatgcctccccttcttttctgcccttcaacccacagctcaggggcagatacagacaggtgtacagcatctgctcctggacagggagccaaacactttgagtgagaatccacccccggggccacaactcctggctaccatgggcccctgctggtcagggggaccacagccatctgtttccacaccccatttcaggaggagacagcctctctatatatgccccttttccaaaatccagggctggtcaactctctctttagcagcagtaggatccccagaacttacggctggcaccctgggtctccctaaaatgagcagagtgctgctgcacccacctctccacccccagcccagacggccctgggaggcccgcactcacctggaccgggagtggctgctgagctggtgcacgtgggggttgtactgggccaggatggtgatggtatcacactgctgcccgatgatgagccgcgcctgctgctccgtggcgctccgcaggtttatgccgttgaactggggaaacaccaggatgggctcagtgggggggtcggggctgtggacagggaggaggccctggggacttgggagcagtgctgttccctaggaggaggagagggggaagaagtgcaggtttccatgggcgccatgcaggagggcagctccctctcacctccagtaactgatccccatactcgaggccagcctggtgagcgatgctccccacggtcaccttggagacgtagatgccgcccttctctccactcacgatggagatgcccagcggctctgagcccttctgcaccttcacgtggcgtggctcctccacataaggcctaaggaaaagtcaaaagtttcggggactcagggtcaaacaaaagggttggggagagcctgagctctctgatcaggcatatgatctgacagtgcagaaagggccccgagcctggatgctcccattgtgacacagctacatggggacatggtgggcccacccctgtgtgacaaacgatcacattcccacagcctcacgcaacacgagcacagcacacgcagacacgcaaccacccaggccaaagacacagagaacggtccgtgtgaactataaacactgatacatgtggattttcattacaggagaggagctgccccacaatatgcaattacaaactctggggggtcttgagatgccctccgaggaaaagagatggctcctgggatgacattccatcctaagggggcaacagaaaataatccagttttatgtttactggctacacagagtgatgcaaactggtcacggaaattaagctgctgcagacccaagcctttgtaaagggagaaggctgggagcaaggctgcagccatgcacttgctgccctggggctgtacagtgcacccaagggcgccggggcaggggctcggcagggagcctctgggcaggccaactgcatggtggaagacctgggcctggtggccacgggcagcctcagaagagatctgtggtggcagagacatctggaaggtgacaaaggttagaaagaagataagggacgctcagaggagaaagacaatcagagacacctggaacataacagaaaagacagtcaagtgatgcggagcctcccgttgggacttcacgccactcagggcttcattcctccaaggtatggacacctgagattttcctcgcaggataaaaccatatagccaaaggctgagggggccagtccaggtcccctctacagcacatggtcaggatagattctagcggggaggcacctaaaccaccccaccccggccacctggaggcagagcagcttcccacttggcagtctcagcctgtggccctatgccccagccctcttgggaaggggaaattaaaattcttcttgagttgtccctgctctctcccaccctccaaagtgttcccacttcccaaacttgcccactctggaaatcctcccttgaccctccagctcagacagatccaccccagactacacccacagtcccttccaattcaacacggattacagccccgtgctgttgagagctgcagagccctcagcacacagccacccctacatcaccctcctgccccagccttagatgatgaaacagaggcccagagcagaaagaggtccacctccgtacaacacgtgtatcacaataaaggagcaagcaactaagtcacagcaatagccacccaacagaacaatgatctgaaccaggttcccaggttccagtgacatgcaaagacgtaagggacacaccacggggtggggaggcccgatcggcatcatttcacttatatttatctgcatctgcaaacaaaagtatgtgtggatttatgcacaaggaggcttcttatgtaggacattaccaagtgttaacaatggtgtctccagttgaggggatctgagctaatcttttttttctttctttttttttggaggcagattcttgctctgtcacccagggtggagtgcagtggcatgatctcagcttgctgcaattccacctcctgggttccaatgattctcctgcctcagcctctcaagtagctgggattacaggtgtacaccatcacgcccagctaatttttgtatttttagtagagacagggtttcaccatgttggccaggctggtctcgaacccctgacctcaggtgatatgcccgtctcagccacccaaagtgctgggattacaggcataggctaccgcgcccagccagagataatctttactttatagtcttctgaatgatttgaattgtttgtaatatgcatagaagttttctctaaacaacagctgcttctcaaaagaggtttataaagtatacttaaactattaaaaatagctaaaaacataatattaagggagatttgattatgtacataaataataaagcatgtttatatatatatatatatatatatatatatatatatatatatatatccaaagggtaatggcaattgaatctcttgttgaagaaataatctgtgacttttttcttctttctacttttctgttttttattttttgagacagagtctcgctctgtcacccaggctggagtgcagtggcgcaatctcagctcactgcaacctccgcctcccgggttcaagcaattctcctgcctcagcctcctgagtagcagggactacaggtgcctgccaccgtgcctggctaatttttgtatttttagtagagacggggtttcaccatgttggccaggttggtcttgaactcctgacctccagtgatccacctgcctcggcctccttacaggtgtgaaccacagcactcggccttctttctacttttctatgtctctgattttccataacaagtataaaatactgtacttcagaatctgggaaacggggccatttttaaaaagaaagctgttgctcagtcaggtcacacatgtcaaatttcatctccaatcggatcctaaccaccgtgagggcaggagtcactcacatttttctccctcctggagcaggtcctggctctccgtgccctgtggggagctaagggaatgcttggcagtgggtggcaaggccttttccacaactgaagaacccacttcacttggggaaggtcccgtcctctctgtggccagggccggggctgagtaaaacaggccagcatgctcctgcgcgtgccacatggtaagagctccgtcagcatttcttccgagttacacccgattcccctacgggggccaggcctctgtgttttgctgtccttccgttacccctcaggttctctggttggttgccttttaagttcagattttcaagtcaaatataagattttctctggctgggcacggtggctcacgtctgtaatcccaacactgtgggaggccgaggcgggtggatcacctgaggtcaggagttcaagacaagcttgaccaacatggtgaaaccctatctctactaaaaatacaaaaattagccaggcgtggtggtgggcgcctgtaatctcagctactcaggaggctgaggcacaagaatcgccttgaacttgggaggcagagattgcagtgagccaagattgcaccactgtactccagcctgggcgaaaagagcaaaactctgtctcaaaaaaaaatatgttttcttaacatagggcccacccctgctgaggctcacagctacagaggcctcagctttctggactcaaatgaaagagagtatctgtgtttcttttggtgattaaataaaagtaagtttatcagagctctttaagatctacaatctagacagaagctgttaaatataaacacaatctagtaagttccatctaggggaacaacagagagggatgtgtgtgcacagtgcgcgggggtgacggattccatggaggaggtgcctctggacagacagcaagcctacagtcaacctgaaacctaagatggacctacattctaaaatgaaccagtaccagtaaaaagctaggctgcacatttatgctttcttcctgtgtatattttatttcacaacagaaagcttcgaatgagagggaaaaagcaaagggtaagaatgagtcccggtgccagccgctaaccacgtggccacaggtctgtcactccaacgtctggatccagtttcctcaactgtgaaacagggataacaataataacgacactggcagggtccctgtaaggatctcgtgacttagccacacgtaaagtgcttgaacaagggcccaggaaggtgtaaatggtgccatgatggcacgatcaccgtcaggtcatttccagcatcatctactgtgagccctcttggctccctgccttgccatccacacacgccccacctccctgcatccagtgccccatggcacttactggtgacaccagcaaatgctgggacactcaagctactcctgctgcttctactaagccccttccctgcagagcccaggcccgctgccgggatgcacactgtccactggtttacccactccaccgatgaccggccatgctcacctgtcctttctccgctccccgagggacgcggggttgacagcgattctgggcaatgtggaggctgaggtctgggactggctacaagaggacagggtgtcgatgttcaggggtgactgtggaggagtgctgcattcagaatgtgacactgaacctgcagagaggagcgggtaatgccggtgtgaactcccatctcacttccccaacagccaagaccaagaggcaggtgcgatccagacacacagctctatccccactgcatcgcatagtctggagctcagatgctaggctctgcattgccccctaccccccacaccaccaggcctactgctgggctcagtgaatttttactgactgactgagatgactatgaagttctcagctaagcccagagactccaccatgaggagtcagaccgcaggaaaagcaggagagatgggaatgtcgagaagtccttacctctctcggagcccacgacactccgcggatatcttggtgttgatgggattttaatgcgttccgccttgaactgcaagttactcgaagaacctattgttccataagggaacaaaacttcaggcctcatggttaaacaccaccctgtccttcctctccaccaggctaccagtcaggataataaatgcaaagctgggccctgctgtttattcccaagggagccttgatatggaacagtcaagaaaagcagacgtttaacatttatctcaatgaactgtgcaggcccagactgctccagaacaggagcgcacaagtctcacttccagccacggaacagcagcctaagagacacggcagctgctccatcttttctccccagcgccagagttccccaagatctccatgggctacctttgtccgactctcctctggggttcactttccatacaaaaatgtatgaagagccatacaaaacagtccagaatgaggccaacaacctcagggacacagagcaaggctcctagctgaggggtcacctgaatggccataaggcccccacagaaagcggaaggcgaaagcaatggctctgacagcagcatgggcatggctggcccatgaaggaagcagcccttcccagtagagaaatgagctcagtcccaggaggtgacaggagctcgtgtggggagcccacccgcagatctggacattaggatgcaggcagagatgaaaagcttggcaccctctgcagcacaaagtccaagtggtgcagttacccaggcgggcgctggagggcagtgagttggacccatgggtggctctcatctcggagtagtcgctgcaggtcctgtggctcaggtccaggctcaggcgtccctggtgctggacactgcgtaaaaacaagaggtgaggagttcgggaggagaaccaggaacagatgtggccactggggagaaacacacagaccaggcaagggttcccaagcgggcagaagggaggcccaggagccactgattatcagccgaggatagcaggctgccctcagccactcccggaggtggcatccactaagagccttcaggaagtagaaagggccacacacatggggcggtcagtatcatacccactccagccatagggtcaggattaggctcactaggaagaagtgataaaaaacagaggttttgcaacctgggtgggcctggggagggggaacctgtcctcccaggaagtgggtaaggagagacaaggcacagaggactttggggaggggacctatgtgcctcactcgggacagcgtgcctaagaaaatgaagggcagagcagggatcgcccacatcaggctgccctgagaccaggcctcaacagcatctttttccagctatgtaatgaggtgacatctcttccctgcttaaactctacagtggtctccactgtccttagaataaaatccaaactcttcatcacggctgcaggtcccacagggtttgtgccctgtgacctcaaacctcttcttgactcgctgcccctttgccaagctcccacgactgtgcctgggtgccctggccttggcaccgatggcccttctccctggaggctccagcccaggtcttgtgcagctggcctctttcatccttctggtcacagcagcatcccctctgccacagggcccttcctgaccacccactctaacttgccaccctcttccaagttacagcccagcctgtcaccctgtttgactgccttcatagcctcttggcaccatctgatatcacttcgttcatttttttttttgtctgcctcccacatttgaaaaaccaaacgacatgagctagaagctaatttgtttagttcagcaatgtatcctcttataattaggatagaccaaggcatgtagtaggtgctcaaaaaatatctgtcaaatgaatgaataagagtggcttggagccagcccaccctcttatgaagtaccagtttcctcatcttcaagacagaaacagtaataggacttagcccatgaggttgctgttgattcggtgaaatgatattcataaaggtctgagcacagtggctgggacataagcactcaaacatcagctgctatcactatcgtgtccttccagtaccttttgaaaccttgtgctgatgaattcagaaagcagccctaaggctccctttccctgtgctgctctagccagtcccctcccaggcaggcaaggaagcttctccaccaatgagcctctttatgcactcatggttccatgtccaggcaggcttgggcagctggggtacagagaagcgtagggtgccttcacatacctgggatgcaaaccctgggggccagcatctcgggccgcaggtggagagctgcaggggccgaccctgtgactgcgcacagtgtagatggggttccgcaggatggagctcacagtggtgctgggggtcaaactccggggaacagtacctagaaatgggcttggtgagaaaagacgccccaaaggacccagccagcccaggacttacacaagcctttcccctgtatcccaggacgcagccgcagtcttttgggaaaaggacttgggagatgagttttaaccaccaattcacaatgtggctgtggctcctggcctgtctccatttgtaaaaaggggggaagtctctttcatgcttcctatttcccaggttgctatggggagaaagcatgttgacaagctaagacatgtcatggctataagacaaaccatcccagacaggacagcatttcccagttctctggacctcagggctgaaaacacatggcagctctctgaaatgctgcctcccctctccctggagactaggcatcccgagtttacaccgaccctcagccccagcccctggctggctgactcacccacagacggcctgctagggtatagcggggggttgctgtgccggctggaatgcccaggcgagtaaggtgcccactcctggagctccggggagagttctccactggccgggacacacttctgttcctgcagatgcaagggcaagagtgtctgctagaaagagtggagtgtggccaggcgcagtggctcacacctataatcccagcactctgggaggccgaggcgggcagatcacctaaggtcaggagttcaagaccaccctggccaacatggcgaaatcccgtctctaccaaaaatacaaaaattagctgggcatggtagtgggtgcctgtaatcccagctacttgggaggctgaggcaggagaatcgcttgaactcgggaggcagaagttgcagtgagccaagactgcaccactgtactccagcctgggtgacagagtgagactccatcttaggggaaaaaaaaaaaaaaaaac

SEQ ID NO: 1580 - DNA, 355 bp, Homo sapiens
ctatacctccaggaactgagcaggaatcactactggagcaagcttcggccgaaaactgggagcagattttggccggcgacgcttctgccccagctcatccaccttctgggaggtgaggtcctcatcacaggatttcttggccggcaggtgggaggagtccccatctccttcagggtagtagctggaagcaatgcggaccctggccttgcgagggggtgatgcgtgcatgggctccccggggtccacgtcagggggcagggcgctcgggggactagtggatggggagctgcccaccagagtggcttctgactcggagctagtctccagcctgtgctggaacttaatggagtcgctc

SEQ ID NO: 1581 - DNA, 1305 bp, Homo sapiens
caattaattgccagccttggttcacactgatgagtgtgctcattggagagactcagcatgcaaaagaaaagactcatcaatttgcagttatttaatttcacgaactgccggatggtggagtcagtagcagcggctgggccgcaacatggcgcctcccacctagacttccggtcaggaaacttccaccttcctccgatttacgtgggcctgcatgagcctacttctcttcttattctagtgccagtggcctctggagtcttggtccttcttactggaagtagccctcctctcctgttacagaggcaataattctccagccttccggtcgccgccaaagcctcctgcctaatcacttcctgtattgtctccctgcggctctttgcacagaccttgggctctgtcgtctctggattcttactgatctcttcctcttctcccaaccgccttgtcatgtctctttgagctatgtcaggaggaacggaagggcactttcttactacttttgttagccaaacggacaaactgtcccctcccctttgttgtaaccacacattcaaggcttccttcagtccagccccatctcccttttcgttgcctccctttcactactccaaatgagcttgccatactttaaacgggtcttgtactttcttatcccttctctggaatgtcatttctactgaagaaaatcctactcttccctcaagacccttctttaatcccctcttgccatggaaacttgagattttcattgaggagctaagttggaaaatataaactagagctgagtctctaccctggcactattgacatttggggccagattattcttggttggggagactgttctgtgcactgtaggatgtggagcagcctcccaggcctctacctgccaaaagcacactcccctttccccaagtggtgacaaccaactgtttccagacattgccagatgtcctgaggtgggagtgagggtgaacagaattgcctcccagctgggggctgctggactaatcaacaagaagtggcaaggactgcaggcaaattgcctcagcacttagatttagcactgcaaggccacttcgacaggtggtagtgatttgtgcgtctcatttcctattcttgattgtgacaaggttctggaggatggagacagctacccctgccacagttcccacaggctatgttgtacatagggcttcatatttaacatgtgagtgaatgaaacacatgagcccgagtgctcttcaggacggcaaggcctacatcaagatggtaaaccttcagttcttaaaaaaaaaaaaa

SEQ ID NO: 1582 - DNA, 285 bp, Homo sapiens
gaaatatcaaacatctgaggagcttataattagttaagcatttacgtgtattaatatatcgtcatgtggacagttgagaggggagaaggcactagacaaatttaaaattgttagaaaccattggcaactgatattcagagcctaagttaaaagcaggatatgtctcaggagcaaatcttttgtgtaaatcctggtatttttactgcagacctttaaaatgacagacgcgggtgagtaaaaattacttctggaaatggatatgattaattaattcaattaattaat

SEQ ID NO: 1583 - DNA, 274 bp, Homo sapiens
tttgtggttcaagcagtttgtgaaagatttgaaagctgcatacatttggggtcaccccaaaaagtcagccctgggccacgagcagtggcagaggaagcagttacagagaattaacagagttacataaaatttactcactttgtaggcaaatatttctaaccttggctccctttcttaaagatctatttccccagctttgttccccagctcaaaagcatttcccaacacgtggatctgctaccactggatctgccaaagcagaatcctctttttt

SEQ ID NO: 1584 - DNA, 8159 bp, Homo sapiens
  misc_feature (7325)..(7325): n equals a,t,g, or c
gctttcccctgcctgcctgtctctagtttctctcacatccctttttttttttcttttctctagccaccctgaagggtcccttcccaagcccttagggaccgcagaggacttggggaccagcaagcaacccccagggcacgagaagagctcttgctgtctgccctgcctcaccctgccccacgccaggcccggtggcccccagctgtatcaagtggaggcggaggaggaggcggaggagggtggcaccatgggccgggcggtgccctccatgcccgggggagtgaagacactgctgccatggacagcccgtgccagccgcagcccctaagtcaggctctccctcagttaccagggtcttcgtcagagcccttggagcctgagcctggccgggccaggatgggagtggagagttacctgccctgtcccctgctcccctcctaccactgtccaggagtgcctagtgaggcctcggcagggagtgggacccccagagccacagccacctctaccactgccagccctcttcgggacggttttggcgggcaggatggtggtgagctgcggccgctgcagagtgaaggcgctgcagcgctggtcaccaaggggtgccagcgattggcagcccagggcgcacgcctgaggcccccaaacggaaatgggccgaggatggtggggatgccccttcacccagcaatacgccctgggccaggcaagagaaccaggaggcagagcgggagggtggcatgagctgcagctgcagcagtggcagtggtgaggccagtgctgggctgatggaggagcgctgcccgtactgcccgagcgcctggccctggactatatcgtgccctgcatgcggtactacggcatctgcgtcaaggacagcttcctgggggcagcactgggcggtcgcgtgctggccgaggtggaggccctcaaacggggtgggcgcctgcgagacgggcagctagtgagccagagggcgatcccaccgcgcagcatccgtggggaccagattgcctgggtggaaggccatgaaccaggctgtcgaagcattggtgccctcatggcccatgtggacgccgtcatccgccactgcgcagggcggctgggcagctatgtcatcaacgggcgcaccaaggtaaggctaggtgggggcctctttggaggggctttgcagcaccctggtttgcagcattcagtgctctgagcacagtgggtttggagacaggcttctgggaggtcacagaaggtttaggcagttcagtggagtgggtatgcttacttgtggggacttgggggggtctttatcctccctacgggccttaatgtgtgcacctgataagctaggagtttgtcctggagccacagtggttcttttttttttttttttttttttcttttctttttttattgatcattcttgggtgtttctcgcagagggggatttggcagggtcacaggacaatagtggagggaaggtcagcagataaacaagtgaacagaggtctctggttttcctaggcagaggaccctgcggccttctgcgtgtttgtgtccctgggtacttgagattagggagtggtgatgactcttaacgagcatgctgccttcaagcatcgccacagtggttcttgactttgccaggaaccctcttaaactcatgagagctgctgacattcacagcgtggaccttggtggggttcatggcctcctggtgtcagtctgtggccccagaccaagcacggggatgtagataggcacacagttcacctggccgttctctgttgctgtctgtccctgtccacatccttccctgtgctcctgtcgtccatccctgtttgctggcccatgtttctagtccatccatcctgtctccaaggcaggagaagcagaagggggagggtggctgtgatgagtgagccctggcgtgagggaaggaaaggggtgctgcccgctgcgcggagtgcttggccctggactgcattgtgccctgggtccccactgtggcatctgcatcgaggacagtctcctgggggtggtactgggtggctgcctgttgcccaggtggagctcatccccatgtctcccacccttcactgtcccagtccctgccctccattccccctgtcctgtgtgtcacttcctccctacccatgtctgtctcttcctctgcctttatgtgtttgttcttagtccctttttctttttgctttagaacaatagttcttaatggtattttggagcctgggtctttttgagaatctgtcagaggccacagatcctctcttaagacaaatgctcatttgcttggagtttccgggcagttgtcaaggcctcatggcctccagctgcctgttcaggaacctggggtcaggagcccagcacaggacagtggtccatagggcctttccgggctgctgacaggatcattgtcttcatgggtggtgtgggggcctggccttgagtccaaggcttggtgtcctttggacaaggccctgtggggagtgcccactgctcaacacagtgatgcctggctggctgatggcacgggcagtgttgtgccctgcaggcgtgaggctgagctcctgatgtcctctgcctcctcctgcagatcccatcttgggttctgcttctgtgtggctttcctctcaggctggagctggctcagggaccagggctcccccggggccaaggcctgtttcctccccaccccagctggaacttgttctacttccctctccctcccgttacttgatagctgagccagagccggcccctccctgggcttggctcctgtgcgggcgggatcagtggcctccctggctcagcatcttcaccccaggttggctgtcgtcctcgtcagggggagaccagaagggctgagtggcccagatgggacactgctctgagcctcaatttgctgatccacggaatacgaaaaccaggttacatccccagtgagtctggcagtttggggaggggagagtaggagaagatctcttgtgttttggtgcctctggtgcccaccttctatgtggttggggacagggccccagcgaggattggggaaggggcgtgtttggacttttttagccctaggtgaccttgattgtcctagggaagtaaggacaggccaggctggactgagaacataggggaggagccctcccctccccagtgagacagcaactccaggctttcccgcttttagatgggccccatctggactctctcctgtactccagagtaaggctgtggggtgctcaggtgggctgcagcagttgccgtggggacatggatcaccagtgtggctagagccagtagaaacgtgcttcttagtcgttctgagtggagctcctgtgtcatccttccttcccccaactccctggttggggacaggtgctccgttgacctgtaggtgggagagagttgactcccactggcagcaagggctaccagaggggaccccagggagagtccagcttgcttggtttgctccttgaagagcagcttggaggtgggacagtcacaggcttctgactggggtgtgtgtgtagtgggggtggggctcttggcaggcagattgtcaccaatagcctttaagtctttggtctcctggccctggtcccacctgtccctcccctaggtgggaggcttggagagcaagtttcctgaggccttcccctgtgagggcaggaagtagatactttccttggggccagaggatgctttcacccccaaggtgtgtatatgtgggggaagggtggggccctaaagagcaggttcctgtttctgtgtgagtcccatgtgcttggtgggaggcgctgtgtgagaatgtacagggcaggaggaaacatagcagggctggggtgcagaggaggcccagagcagtgcactcagtctgcaggtactgcactgggcactggggagaccaacctggccccaggggcttccctgtggctgccttccagggcagtactaggtaaacaggtgcctgtgctgatgccatgttgctaggagtggaacggacaatcagccggagtactcaaggtgacccttggtctctgaatcctgaataacaaagagggtcagaaggaagagtgtcccaggccagtgctgaggccttgtggtggcgatgagctcagcctgttgaggcatggagcagagtgatgggagaggcacatgaggttgggggcctttgaggctgtggttgggaatttgtattttctcaggatggagtgaagacctggagaggaggggctctggctgctgtgtggggatgaattgtgggaagagggtgcagcactggaccccttccctgccacccatccacgtgcatcatcagtgtaatctctgattggattcctaattggggaggtcttgcccatctctagtcagtaactcactgtttctaagcctcctggaccatggcccaattcttctcccagtgaggtggttgctcagagtgccgacccttccatagggagtgagcagtgcaaagaaggtgccccctcctgaaccttgaagtgtagccattagggttttccctggggggccttctcactaattgtactctggtgctgccagagagaaggttgtcagcttcccactgctaggtggcagtagatggtggcagccctctctttccagggcaaggtctggtggatgaggtgcacatggttaatgcagagcagcttaacatccaccacagagggtgagccctgggataatgtgttgggaggcgtcctggggagggtgaggattgaagcagcccagtctgctgtggcgtgcgtgcttggcaagcatcctgttgtggcagtggccactgatgtttgatcgtgaatgtttatcttgggactgtcttgctgggccgggccataggtgtagctgagcattcgtggggaatggacgccagcagagttgtaccagggcagagaggtcagggcagagaggtcaagacagatggtccgggctggggagaagttgaagggtccttgtgccagtcctcccctttttgtgtgctacctcatcttgccactgcagtgactttgggcagagggtgggacagggaccttttaaaatttttaaatggcatttcagcctgtgctccagttctccatgtggcaggcactgtgctggctgtcttcccagacacttgttatcttgttcacttgttccacaacaacctgtgaaatagctgtgagctccattggatccatggatgaggaacctgagaccaggaagtcacctgcctgatgccacagctcatgtggcagcactgagacttgaaccagggaattgtgtctgcagaagtggctgggccatttcctttacctctcagccacctttctgccagctccctgatgacaaacatcccggggccctggccacagcattgtagggctgggtcaggggagtggcaactgtcaggcagaggaaagaaccctgtagacagagaaaccaagccctgcaatgagtcctgttagatctccaggagttggggctccagaacctcccaagttatgttctcagagagattaattgctaccgctgtaaacagcagtgtttattacccctgctgtacacatcaggcagttgaggcccattcaggtgttggaactggctagggttacccagcaaattatccttggagttggaattaggtctttctattcagactgtagcttttggctcctgttcggaggtctatgggacagataatttagtggggattctttgtagtccagggcagcagttcttaacattgctgcatggtagaattacctgggaagctttaccaatttcaggcccttccttaggccaggtacttcagaacctcagagctccccagggggctccactccacagccaagggtaagaattcctggtctagggctgtgaggccacctccttgcacacctgaaaatgtttaaattggtattattctactgaaatggctgaggtggggtttggggtatcttgaaacaaatcaaactctgttactaattgagccctagctgggtgccaggccccaggtatgtgtgttgggagggagtgggctcttgaggcccaggagctgaggtttctgatagacttggggatgggattttggctgaaaaagaaagtcttttggggcaggagcttggaacccttgacccaaggagtcatggggaagatggggcaaggaggggtgggaaaataggtaattcatggctgcttctctaagatgtgcctgcctagccccagtaaacctacctccctccatccctgccaggccatggtggcgtgttacccaggcaacgggctcgggtacgtaaggcacgttgacaatccccacggcgatgggcgctgcatcacctgtatctattacctgaatcagaactgggacgttaaggtaggggtgagggtgagggtgagggtggcgctggggctagggctggggcgggggtggcgtgcgtccactccattttccactctcagcccagattctggcattctcctgtttctcttctcaacacacagcgggcagtgcgatctgccggctcttcctgggaaatggcacctcctcctctctagcggactgtgtggtgggaactcccctctttccgggaatggtgctgtctgcccagccccacccggccttgtaatgaacactttcccccttttcctgtctttagtagcttcctgcccatctccatggtgatgcagtctctgggttgtcattcactttgagagcccgaggggtgggagggagtgatgcaggcagacgctgcgcctcctagtgggctcccggggcaccgtgggaggcagcggctcctggccgtaccagctagcctcatcctttggcctgcccccaggtgcatggcggcctgctgcagatcttccctgagggccggcccgtggtagccaacatcgagccactctttgaccggttgctcattttctggtctgaccggcggaacccccacgaggtgaagccagcctatgccaccaggtatgacctgtacttctggagacgcacccaggtgctccccctgtgacaatgtcctgtcagagcctcagagtgactagggagcgacgaagtattgagagggggcctaggtgggagcagaaccgggtggctcaaaaggatggccgcctagtgtgtgtggatatggtagctggaattgcagaaaactaatgtccaaccaccctggtctccaggtacgccatcactgtctggtattttgatgccaaggagcgggcagcagccaaagacaagtatcagctaggtacctgcttccctcccttcagtccttcctattctgtgggccctcttggcgtgnatgccaccccatccccctcatcagcctcttgttaaatcccacactcatttttcttcatctctgcccaccttccttagcccactctcctgggtaccccaacaggagccccatttcttcctggtcctctccccatctccccaggtttcccttggcttctttgtccttctgatgactcactgtctcctgtcccctctcacccccagcatcaggacagaaaggtgtccaagtacctgtatcacagccgcctacgcccacctagtggccagtcccagagccgcatggcagacagcttaaatgacttcaggagagccctgggcctgtgctggctgctccttccctgccaccgctgctgcttctgactttgcctctgtcctgcctggtgtggagggctctgtctgttgctgaggaccaaggaggagaagagacctttgctgccccatcatgggggctgggttgtcacctggacagggggcagccgtggaggcaccgttaccaactgaagctgggggcctgggtcctaccctgtctggtcatgaccccattaggtatggagagctgggaggaggcattgtcacttcccaccaggatgcaggacttggggttgaggtgagtcatggcctcttgctggcaatggggtgggaggagtacccccaagtcctctcactcctccagcctggaatgtgaagtgactccccaacccctttggccatggcaggcaccttttggactgggctgccactgcttgggcagagtaaaaggtgccaggaggagcatgggtgtggaagtcctgtcagccaagaaataaaagtttacctcagagctgcacacatctga

SEQ ID NO: 1585 - DNA, 13327 bp, Homo sapiens
gctttcccctgcctgcctgtctctagtttctctcacatccctttttttttttcctttctctagccaccctgaagggtcccttcccaagcccttagggaccgcagaggacttggggaccagcaagcaacccccagggcacgagaagagctcttgctgtctgccctgcctcaccctgccccacgccaggcccggtggcccccagctgcatcaagtggaggcggaggaggaggcggaggagggtggcaccatgggcccgggcggtgccctccatgcccgggggatgaagacactgctgccatggacagcccgtgccagccgcagcccctaagtcaggctctccctcagttaccagggtcttcgtcagagcccttggagcctgagcctggccgggccaggatgggagtggagagttacctgccctgtcccctgctcccctcctaccactgtccaggagtgcctagtgaggcctcggcagggagtgggacccccagagccacagccacctctaccactgccagccctcttcgggacggttttggcgggcaggatggtggtgagctgcggccgctgcagagtgaaggcgctgcagcgctggtcaccaaggggtgccagcgattggcagcccagggcgcacggcctgaggcccccaaacggaaatgggccgaggatggtggggatgccccttcacccagcaaacggccctgggccaggcaagagaaccaggaggcagagcgggagggtggcatgagctgcagctgcagcagtggcagtggtgaggccagtgctgggctgatggaggaggcgctgccctctgcgcccgagcgcctggccctggactatatcgtgccctgcatgcggtactacggcatctgcgtcaaggacagcttcctgggggcagcactgggcggtcgcgtgctggccgaggtggaggccctcaaacggggtgggcgcctgcgagacgggcagctagtgagccagagggcgatcccgccgcgcagcatccgtggggaccagattgcctgggtggaaggccatgaaccaggctgtcgaagcattggtgccctcatggcccatgtggacgccgtcatccgccactgcgcagggcggctgggcagctatgtcatcaacgggcgcaccaaggtaaggctaggtgggggcctctttggaggggctttgcagcaccctggtttgcagcattcagtgctctgagcacagtgggtttggagacaggcttctgggaggtcacagaaggtttaggcagttcagtggagtgggtatgcttacttgtggggacttgggggggtctttatcctccctacgggccttaatgtgtgcacctgataagctaggagtttgtcctggagccacagtggttcttttttttttttttttttttttcttttctttttttattgatcattcttgggtgtttctcgcagagggggatttggcagggtcacaggacaatagtggagggaaggtcagcagataaacaagtgaacagaggtctctggttttcctaggcagaggaccctgcggccttctgcgtgtttgtgtccctgggtacttgagattagggagtggtgatgactcttaacgagcatgctgccttcaagcatcgccacagtggttcttgactttgccaggaaccctcttaaactcatgagagctgctgacattcacagcgtggaccttggtggggttcatggcctcctggtgtcagtctgtggccccagaccaagcacggggatgtagataggcacacagttcacctggccgttctctgttgctgtctgtccctgtccacatccttccctgtgctcctgtcgtccatccctgtttgctggcccatgtttctagtccatccatcctgtctccaaggcaggagaagcagaagggggagggtggctgtgatgagtgagccctgggctgagggaaggaaaggggtgctgcccgctgggccgagtgcttggccctggactgcattgtgccctgggtccccactgtggcatctgcatcgaggacagtctcctgggggtggtactgggtggctgcctgttggcccaggtggagctcatccccatgtctcccacccttcactgtcccagtccctgccctccattccccctgtcctgtgtgtcacttcctccctacccatgtctgtctcttcctctgcctttatgtgtttgttcttagtccctttttctttttgctttagaacaatagttcttaatggtattttggagcctgggtctttttgagaatctgtcagaggccacagatcctctcttaagacaaatgctcatttgcttggagtttccgggcagttgtcaaggcctcatggcctccagctgcctgttcaggaacctggggtcaggagcccagcacaggacagtggtccatagggcctttccgggctgctgacaggatcattgtcttcatgggtggtgtgggggcctggccttgagtccaaggcttggtgtcctttggacaaggccctgtggggagtgcccactgctcaacacagtgatgcctggctggctgatggcacgggcagtgttgtgccctgcaggcgtgaggctgagctcctgatgtcctctgcctcctcctgcagatcccatcttgggttctgcttctgtgtggctttcctctcaggctggagctggctcagggaccaggggctcccccggggccaaggcctgtttcctccccaccccagctggaacttgttctacttccctctccctcccgttacttgatagctgagccagagccggcccctccctgggcttggctcctgtgcgggcgggatcagtggcctccctggctcagcatcttcaccccaggttggctgtcgtcctcgtcagggggagaccagaagggctgagtggcccagatgggacactgctctgagcctcaatttgctgatccacggaatacgaaaaccaggttacatccccagtgagtctggcagtttggggaggggagagtaggagaagatctcttgtgttttggtgcctctggtgcccactttctatgtggttggggacagggccccagcgaggattggggaaggggcgtgtttggacttttttagccctaggtgaccttgattgtcctagggaagtaaggacaggccaggctggactgagaacataggggaggagccctcccctccccagtgagacagcaactccaggctttcccgcttttagatgggccccatctggactctctcctgtactccagagtaaggctgtggggtgctcaggtgggctgcagcagttgccgtggggacatggatcaccagtgtggctagagccagtagaaacgtgcttcttagtcgttctgagtggagctcctgtgtcatccttccttcccccaactccctggttggggacaggtgctccgttgacctgtaggtgggagagagttgactcccactggcagcaagggctaccagaggggaccccagggagagtccagcttgcttggtttgctccttgaagagcagcttggaggtgggacagtcacaggcttctgactggggtgtgtgtgtagtgggggtggggctcttggcaggcagattgtcaccaatagcctttaagtctttggtctcctggccctggtcccacctgtccctcccctaggtgggaggggtggagagcaagtttcctgaggccttcccctgtgagggcaggaagtagatactttccttggggccagaggatgctttcacccccaaggtgtgtatatgtgggggaagggtggggccctaaagagcaggttcctgtttctgtgtgagtcccatgtgcttggtgggaggcgctgtgtgagaatgtacagggcaggaggaaacatagcagggctggggtgcagaggaggcccagagcagtgcactccagtctgcaggtactgcactgggcactggggagaccaacctggccccaggggcttccctgtggctgccttccagggcagtactaggtaaacaggtgcctgtgctgatgccatgttgctaggagtggaacggacaatcagccggagtactcaaggtgacccttggtctctgaatcctgaataacaaagagggtcagaaggaagagtgtcccaggccagtgctgaggccttgtggtggcgatgagctcagcctgttgaggcatggagcagagtgatgggagaggcacatgaggttgggggcctttgaggctgtggttgggaatcttgtattttctcaggatggagtgaagacctggagaggaggggctctggctgctgtgtggggatgaattgtgggaagagggtgcagcactggaccccttccctgccacccatccacgtgcatcatcagtgtaatctctgattggattcctaattggggaggtcttgcccatctctagtcagtaactcactgtttctaagcctcctggaccatggcccaattcttctcccagtgaggtggttgctcagagtgccgacccttccatagggagtgagcagtgcaaagaaggtgccccctcctgaaccttgaagtgtagccattagggttttccctggggggccttctcactaattgtactctggtgctgccagagagaaggttgtcagcttcccactgctaggtggcagtagatggtggcagccctctctttccagggcaaggtctggtggatgaggtgcacatggttaatgcagagcagcttaacatccaccacagagggtgagccctgggataatgtgttgggaggcgtctgcggagggtgaggaattgaagcagtcccagtctgctgtggcgtgcgtgcttggcaagcatcctgttgtggcagtggccactgatgtttgatcgtgaatgtttatcttgggactgtcttgctgggccgggcccataggtgtagctgagcattcgtggggaatggacgccagcagagttgtaccagggcagagaggtcagggcagagaggtcaagacagatggtccgggctggggagaagttgaagggtccttgtgccagtcctcccctttttgtgtgctacctcatcttgccactgcagtgactttgggcagagggtgggacagggaccttttaaaatttttaaatggcatttcagcctgtgctccagttctccatgtggcaggcactgtgctggctgtcttcccagacacttgttatcttgttcacttgttccacaacaacctgtgaaatagctgtgagctccattggatccatggatgaggaacctgagaccaggaagtcacctgcctgatgccacagctcatgtggcagcactgagacttgaaccagggaattgtgtctgcagaagtggctgggccatttcctttacctctcagccacctttctgccagctccctgatgacaaacatcccggggccctggccacagcattgtagggctgggtcaggggagtggcaactgtcaggcagaggaaagaaccctgtagacagagaaaccaagccctgcaatgagtcctgttagatctccaggagttggggctccagaacctcccaagttatgttctcagagagattaattgctaccgctgtaaacagcagtgtttattacccctgctgtacacatcaggcagttgaggcccattcaggtgttggaactggctagggttacccagcaaattatccttggagttggaattaggtctttctattcagactgtagcttttggctcctgttcggaggtctatgggacagataatttagtggggattctttgtagtccagggcagcagttcttaacattgctgcatggtagaattacctgggaagctttaccaatttcaggcccttccttaggccaggtacttcagaacctcagagctccccagggggctccactccacagccaagggtaagaattcctggtctagggctgtgaggccacctccttgcacacctgaaaatgtttaaattggtattattctactgaaatggctgaggtggggtttggggtatcttgaaacaaatcaaactctgttactaattgagccctagctgggtgccaggccccaggtatgtgtgttgggagggagtgggctcttgaggcccaggagctgaggtttctgatagacttggggatgggattttggctgaaaaagaaagtcttttggggcaggagcttggaacccttgacccaaggagtcatggggaagatggggcaaggaggggtgggaaaataggtaattcatggctgcttctctaagatgtgcctgcctagccccagtaaacctacctccctccatccctgccaggccatggtggcgtgttacccaggcaacgggctcgggtacgtaaggcacgttgacaatccccacggcgatgggcgctgcatcacctgtatctattacctgaatcagaactgggacgttaaggtaggggtgagggtgagggtgagggtggcgctggggctagggctggggcgggggtggcgtgcgtccactccattttccactctcagcccagattctggcattctcctgtttctcttctcaacacacagcgggcagtgcgatctgccggctcttcctgggaaatggcacctcctcctctctagcggactgtgtggtgggaactcccctctttccgggaatggtgctgtctgcccagccccacccggccttgtaatgaacactttcccccttttcctgtctttagtagcttcctgcccatctccatggtgatgcagtctctgggttgtcattcactttgagagcccgaggggtgggagggagtgatgcaggcagacgctgcgcctcctagtgggctcccggggcaccgtgggaggcagcggctcctggccgtaccagctagcctcatcctttggcctgcccccaggtgcatggcggcctgctgcagatcttccctgagggccggcccgtggtagccaacatcgagccactctttgaccggttgctcattttctggtctgaccggcggaacccccacgaggtgaagccagcctatgccaccaggtatgacctgtacttctggagacgcacccaggtgctccccctgtgacaatgtcctgtcagagcctcagagtgactagggagcgacgaagtattgagagggggcctaggtgggagcagaaccgggtggctcaaaaggatggccgcctagtgtgtgtggatatggtagctggaattgcagaaaactaatgtccaaccaccctggtctccaggtacgccatcactgtctggtattttgatgccaaggagcgggcagcagccaaagacaagtatcagctaggtacctgcttccctcccttcagtccttcctattctgtgggccctcttgggcctgatgccaccccatccccctcatcagcctcttgttaaatcccaccactcatttttcttcatctctgcccaccttccttagcccactctcctggtaccccaacaggagccccatttcttcctggtcctctccccatctccccaggtttccctggcttctttgtccttctgatgactcactgtctcctgtcccctctcacccccagcatcaggacagaaaggtgtccaagtacctgtatcacagccgcctacgcccacctagtggccagtcccagagccgcatggcagacagcttaaatgacttcaggagagccctgggcctgtgctggctgctccttccctgccaccgctgctgcttctgactttgcctctgtcctgcctggtgtggagggctctgtctgttgctgaggaccaaggaggagaagagacctttgctgccccatcatgggggctggggttgtcacctggacagggggcagccgtggaggccaccgttaccaactgaagctgggggcctgggtcctaccctgtctggtcatgaccccattaggtatggagagctgggaggaggcattgtcacttcccaccaggatgcaggacttggggttgaggtgagtcatggcctcttgctggcaatggggtgggaggagtacccccaagtcctctcactcctccagcctggaatgtgaagtgactccccaacccctttggccatggcaggcaccttttggactgggctgccactgcttgggcagagtaaaaggtgccaggaggagcatgggtgtggaagtcctgtcagccaagaaataaaagtttacctcagagctgcacacatctgactccatctgcaatttagggcctttattgaccgaggagggtatggaggtttgagggccagtgagcccaccatagtggagcctgacctcagcaggccactggctggagctggaagtctggggggacactgcccaggccagtgcactgcaggtgaggttgatggtgccagggcgtaccacagggagcaggcagaacctctgtaaggtggccgtaaggaataggaagatacccgagtgggccaggcctgtgcccaggcacatctgctttgccgggtacacaggtgcacagtgagcaccaggtaccccagagccagtccaggctggtccccttcctcctctgcctgcacctgaggcaaagggcatgaaagcatcattgccctggaacttgcccttgtccaggaagttggtagggttgaagcagtctgggtctttgaattgagtggggtcccggtgtgcagtcacaagcaggggaatcacaaaagtgccctggggatacatgcaacttgggttacctgcgggcttggtgagcacctgcaccacctccatccaagacgctttttaaaagcccaagggaataggccgggcaagtagctcacgcctgtaatcccagcactctgggaggctgaggacagatcacttgaggtcagaagttcgagaccagcctggccaacatggcgaaacctgtctctactaaaaatacaaaaattagccaggcgtggtggtgggtgcctgtaataccaggtactcaggaggctgaggcaggacaatcgcttgaacccaggaagtggaggttgcagtgagccaagatcatgccactgcattctagcctgaatgacagagccagactccgtctcaaacaacaacaacaaaaagcctaagggaaggcagagctgccttcctgctccaggggtaactgattgtgttttggtctgcacagcgcacacctgctgattctggctgatctcatgcacccgggtcccgcacgggatccccagactcagtgggtacctttgggcagacagtggctgtgcaggtgggtgtcgagggtgagggtgcgcggcagcccaggggcaccacgctgatgaagcactggatctcgagcagcactgcgttggcgtagggcaggcacacgcgatagtccaggcttggggcgggcctccaccctaccacagggtccagctcctgcaccttggctcaggccgggggaggctgtgagctgcgcacttccaggaccctccagccatccccagactgcagcctcccattctgggtctctccgggttgcacacctgccacctctaggtacttaagcagaatgaggagcccatagcacagggtggtgctcgtggtttcggtgacgccaaaaaaaaaatgcgtcgtcattaccgacgtctactcctggaaatggctctccgggtcctgctgttactgtgggcagaggagatgtgctgccgcgtgccaggcacctgttggtgggcggcatggatagagtttagagagctgggacccatgccttacccatctggtcaagcaatcaatgaaatcgcggggctccgctggctgccgcatctgccagtgtcgttgaatttgctcagagatgacccgcagctccgaaaagtttcggaagattcggtggtgcgggcccgggagccagtccatgagggacaggcaaatgtacatctggagagacagggtctgtctcaacatgggccctgcacaaggccactaggccttagtttccctacagggagattggactaggactttgatactggatgttctagaactcttccaggaatctgtcccattctaatgatccattgtaggtaggtctgtgtactcgggatttggcataaggctggacgcaccaaggaaagattgtggccggccctctcacctcgccccatctggaactaatgatgcagaagttgtcactgaagaggttcaggagcctcaggaactccgggtccccatagcgatagcggttcccgaagacaagaacagataacattggatacagcattatccagtagccgcacggggtcaaacggggctcctgggggtaggaacaggacggtggtcataacgcgtggtcctgcccccagccagccccatgggcttactggctttcttccacccaaataccttccagtggccccgtcttggcagtgcaagggactctcccacaccaggcccttccgctctcccggccaggccgaagcaatggtggcttgaaattcgtctagcagacaagccgcctcctccaggacgcgcgcctcgacggtccgcgtacccaacccgaacttcttaagcgctccaagtgcaaaattgcgcagtgtccaccagcacggccggttagaaaacaagattcctgtggtggggacgggaaaggaggcgggccggggagccggccacgccctatccaggaagcgccgggtcactggctacatccctttaggggcctccgactcctgcggccggcttcgttccctttgcttctttaccagacctccaagtgccctatccacacattggccccgcctttgctgggctccatccctgacctaggctggctctcgggctttgactcttaggctcttttctcctgttggctgcaggatgaacctccattctaaccttacgctttagcgccgccccgccctctctcggccgtttgcacctcattagctggagtctctattaggccccgcccccatttgcccgcctctaccatttacccgcccagcctggagcgtccgggccggcaagtccagcgccggggcctcactgtttccgcgtgtgaagcgttcgaagactgccatggacccgcggccagagaccgcatccgcctgtagcactaacgcgtcccgcagcgctgcgtagccgcacagccccaccgcagggcgcgggcccagccgcactgtgaacacccggccccagcggccggagagctacgggtagccggtgctcagcgggtgcccatagggttcctcatcggagccattgcccccagctccctcttccttcagacccaggagtcctcgtctcagaccctcattcctcaggcccaggaattcaaatccccagctccttcctccctgagatccaggagtccaggcccccacttccttcttcccttaggacctggaagtccagcttcccagcctcctgcaccctcagagtcgtctcctgggccctcagtactcagcctgcccaccctgaaccagaacagaccccctgctcccctcttcccacaacctgatttcctgctctgggctccttcgttacgacccagtgtcccggccccaggctctccactccctattctcctttcctagtactcagcagtccggagcactcatccttcctgtccttcctcaggatcatagagtacaaaccctcagctgtcttcattcaggaggagttctagtccccagccccaccttcacgaatccagaattccgttcccccattcctgtcgggaatggagtgcgcggtccaggcctccggactgcagctgcaagttccccagcaatgggagcggcctgggccggggaggtagggacccccgcatctgagcgcggcacccaccctacccccaccacgccggcgccagcaccagaagccacaacagcagcgcagcgatacccgcgacatgcctgcaattctccacgcctgcaccccttcacctctatttgatttccaaggggtcttaggggtggagcggggcggagacccgatgtgggaggagtgggcgtctccgggctgctcattccgtggattccccaacccgacgtctccaccccgcccccagccctagtggagctgtgccctggctccccctggctttttttgtgtgtctgcctcagcctgtcttacttagcaactttcgtgcaccagcattttcatggcaacacacctggacaacaggtgcaccctcctgagcccctagcacctttgagtccaatttacttggcctgtaagtgtgtattcctcaatctccgggccacctctgggtcccctgaacgctgtaccctgtacctctgattcctaaatacacaccgactctcaaatacaccacttctgttttttttttttcccttcttagagtttcactcttgttgcccaggctggagtgcagcagtgggatctcggctcactgcaacctccacctcccaggttcaagattctcctgtttcagcctcctgagtagctgggattacaggcatgcaccactaggcctggctaatttttgtatttttagtagagacggagtttcaccgtgttggccaggcagatctcaagctactgacctcaggtgatccgcctgcctcggcctcccgaggtgttgagactacaggccactgcgcctggctcaaatacacttctaaagacacccctggcattcctgtgctctgtgcctgtgattcctaggagctcacacctgagcccttgtcacttccattactcttaggaccctgtgtactatgcttgttccccagatctgccttcaatttccctggcttctgggtgtccatcagtctggcacttctgtgcctctccttagttcttcagggtgcctttctgcatgttgatccccttgtacctccatattatgtcctgccctgaatctaccatctctatccccaaggcactggctcccagatgcccccaaatgttctgtgcccatgctgctgaaccccctggtatccagtcccccaagtccctgtctgaggccaggccatgacgacagacaaacttatccctcattctctcatctatcccccccaacccccatcctagggcatgggctagagggggcagactctggcctggatgggccagggctgcggtggtgggagcagtgaggttggggctgtatttggaacagactgttcaggaatgtggtccaccctcctgcctgtccctgcttggccaaatccagccttcctccaagtgcctggcacagggcccagacctggggagatggtgggcggggggtggactgtgcagagcctaggactggcattgtctctgggagggtctctgtgtatctttgtttcatctctcagtcttgcttgctccctccctccaataaaaaagaaaaaaaaaaaaaaagaaaaaaaaaaaaaaaaaaaaaaaaaaaaaaaaaaaaaagaaca

SEQ ID NO: 1586 - DNA, 8165 bp, Homo sapiens
gctttcccctgcctgcctgtctctagtttctctcacatccctttttttttttcctttctctagccaccctgaagggtcccttcccaagcccttagggaccgcagaggacttggggaccagcaagcaacccccagggcacgagaagagctcttgctgtctgccctgcctcaccctgccccacgccaggcccggtggcccccagctgcatcaagtggaggcggaggaggaggcggaggagggtggcaccatgggcccgggcggtgccctccatgcccgggggatgaagacactgctgccatggacagcccgtgccagccgcagcccctaagtcaggctctccctcagttaccagggtcttcgtcagagcccttggagcctgagcctggccgggccaggatgggagtggagagttacctgccctgtcccctgctcccctcctaccactgtccaggagtgcctagtgaggcctcggcagggagtgggacccccagagccacagccacctctaccactgccagccctcttcgggacggttttggcgggcaggatggtggtgagctgcggccgctgcagagtgaaggcgctgcagcgctggtcaccaaggggtgccagcgattggcagcccagggcgcacggcctgaggcccccaaacggaaatgggccgaggatggtggggatgccccttcacccagcaaacggccctgggccaggcaagagaaccaggaggcagagcgggagggtggcatgagctgcagctgcagcagtggcagtggtgaggccagtgctgggctgatggaggaggcgctgccctctgcgcccgagcgcctggccctggactatatcgtgccctgcatgcggtactacggcatctgcgtcaaggacagcttcctgggggcagcactgggcggtcgcgtgctggccgaggtggaggccctcaaacggggtgggcgcctgcgagacgggcagctagtgagccagagggcgatcccgccgcgcagcatccgtggggaccagattgcctgggtggaaggccatgaaccaggctgtcgaagcattggtgccctcatggcccatgtggacgccgtcatccgccactgcgcagggcggctgggcagctatgtcatcaacgggcgcaccaaggtaaggctaggtgggggcctctttggaggggctttgcagcaccctggtttgcagcattcagtgctctgagcacagtgggtttggagacaggcttctgggaggtcacagaaggtttaggcagttcagtggagtgggtatgcttacttgtggggacttgggggggtctttatcctccctacgggccttaatgtgtgcacctgataagctaggagtttgtcctggagccacagtggttctttttttttttttttttttttcttttctttttttattgatcattcttgggtgtttctcgcagagggggatttggcagggtcacaggacaatagtggagggaaggtcagcagataaacaagtgaacagaggtctctggttttcctaggcagaggaccctgcggccttctgcgtgtttgtgtccctgggtacttgagattagggagtggtgatgactcttaacgagcatgctgccttcaagcatcgccacagtggttcttgactttgccaggaaccctcttaaactcatgagagctgctgacattcacagcgtggaccttggtggggttcatggcctcctggtgtcagtctgtggccccagaccaagcacggggatgtagataggcacacagttcacctggccgttctctgttgctgtctgtccctgtccacatccttccctgtgctcctgtcgtccatccctgtttgctggcccatgtttctagtccatccatcctgtctccaaggcaggagaagcagaagggggagggtggctgtgatgagtgagccctgggctgagggaaggaaaggggtgctgcccgctgggccgagtgcttggccctggactgcattgtgccctgggtccccactgtggcatctgcatcgaggacagtctcctgggggtggtactgggtggctgcctgttggcccaggtggagctcatccccatgtctcccacccttcactgtcccagtccctgccctccattccccctgtcctgtgtgtcacttcctccctacccatgtctgtctcttcctctgcctttatgtgtttgttcttagtccctttttctttttgctttagaacaatagttcttaatggtattttggagcctgggtctttttgagaatctgtcagaggccacagatcctctcttaagacaaatgctcatttgcttggagtttccgggcagttgtcaaggcctcatggcctccagctgcctgttcaggaacctggggtcaggagcccagcacaggacagtggtccatagggcctttccgggctgctgacaggatcattgtcttcatgggtggtgtgggggcctggccttgagtccaaggcttggtgtcctttggacaaggccctgtggggagtgcccactgctcaacacagtgatgcctggctggctgatggcacgggcagtgttgtgccctgcaggcgtgaggctgagctcctgatgtcctctgcctcctcctgcagatcccatcttgggttctgcttctgtgtggctttcctctcaggctggagctggctcagggaccagggctcccccggggccaaggcctgtttcctccccaccccagctggaacttgttctacttccctctccctcccgttacttgatagctgagccagagccggcccctccctgggcttggctcctgtgcgggcgggatcagtggcctccctggctcagcatcttcaccccaggttggctgtcgtcctcgtcagggggagaccagaagggctgagtggcccagatgggacactgctctgagcctcaatttgctgatccacggaatacgaaaaccaggttacatccccagtgagtctggcagtttggggaggggagagtaggagaagatctcttgtgttttggtgcctctggtgcccactttctatgtggttggggacagggccccagcgaggattggggaaggggcgtgtttggacttttttagccctaggtgaccttgattgtcctagggaagtaaggacaggccaggctggactgagaacataggggaggagccctcccctccccagtgagacagcaactccaggctttcccgcttttagatgggccccatctggactctctcctgtactccagagtaaggctgtggggtgctcaggtgggctgcagcagttgccgtggggacatggatcaccagtgtggctagagccagtagaaacgtgcttcttagtcgttctgagtggagctcctgtgtcatccttccttcccccaactccctggttggggacaggtgctccgttgacctgtaggtgggagagagttgactcccactggcagcaagggctaccagaggggaccccagggagagtccagcttgcttggtttgctccttgaagagcagcttggaggtgggacagtcacaggcttctgactggggtgtgtgtgtagtgggggtggggctcttggcaggcagattgtcaccaatagcctttaagtctttggtctcctggccctggtcccacctgtccctcccctaggtgggaggggtggagagcaagtttcctgaggccttcccctgtgagggcaggaagtagatactttccttggggccagaggatgctttcacccccaaggtgtgtatatgtgggggaagggtggggccctaaagagcaggttcctgtttctgtgtgagtcccatgtgcttggtgggaggcgctgtgtgagaatgtacagggcaggaggaaacatagcagggctggggtgcagaggaggcccagagcagtgcactccagtctgcaggtactgcactgggcactggggagaccaacctggccccaggggcttccctgtggctgccttccagggcagtactaggtaaacaggtgcctgtgctgatgccatgttgctaggagtggaacggacaatcagccggagtactcaaggtgacccttggtctctgaatcctgaataacaaagagggtcagaaggaagagtgtcccaggccagtgctgaggccttgtggtggcgatgagctcagcctgttgaggcatggagcagagtgatgggagaggcacatgaggttgggggcctttgaggctgtggttgggaatttgtattttctcaggatggagtgaagacctggagaggaggggctctggctgctgtgtggggatgaattgtgggaagagggtgcagcactggaccccttccctgccacccatccacgtgcatcatcagtgtaatctctgattggattcctaattggggaggtcttgcccatctctagtcagtaactcactgtttctaagcctcctggaccatggcccaattcttctcccagtgaggtggttgctcagagtgccgacccttccatagggagtgagcagtgcaaagaaggtgccccctcctgaaccttgaagtgtagccattagggttttccctggggggccttctcactaattgtactctggtgctgccagagagaaggttgtcagcttcccactgctaggtggcagtagatggtggcagccctctctttccagggcaaggtctggtggatgaggtgcacatggttaatgcagagcagcttaacatccaccacagagggtgagccctgggataatgtgttgggaggcgtcctggggagggtgaggattgaagcagcccagtctgctgtggcgtgcgtgcttggcaagcatcctgttgtggcagtggccactgatgtttgatcgtgaatgtttatcttgggactgtcttgctgggccgggcccataggtgtagctgagcattcgtggggaatggacgccagcagagttgtaccagggcagagaggtcagggcagagaggtcaagacagatggtccgggctggggagaagttgaagggtccttgtgccagtcctcccctttttgtgtgctacctcatcttgccactgcagtgactttgggcagagggtgggacagggaccttttaaaatttttaaatggcatttcagcctgtgctccagttctccatgtggcaggcactgtgctggctgtcttcccagacacttgttatcttgttcacttgttccacaacaacctgtgaaatagctgtgagctccattggatccatggatgaggaacctgagaccaggaagtcacctgcctgatgccacagctcatgtggcagcactgagacttgaaccagggaattgtgtctgcagaagtggctgggccatttcctttacctctcagccacctttctgccagctccctgatgacaaacatcccggggccctggccacagcattgtagggctgggtcaggggagtggcaactgtcaggcagaggaaagaaccctgtagacagagaaaccaagccctgcaatgagtcctgttagatctccaggagttggggctccagaacctcccaagttatgttctcagagagattaattgctaccgctgtaaacagcagtgtttattacccctgctgtacacatcaggcagttgaggcccattcaggtgttggaactggctagggttacccagcaaattatccttggagttggaattaggtctttctattcagactgtagcttttggctcctgttcggaggtctatgggacagataatttagtggggattctttgtagtccagggcagcagttcttaacattgctgcatggtagaattacctgggaagctttaccaatttcaggcccttccttaggccaggtacttcagaacctcagagctccccagggggctccactccacagccaagggtaagaattcctggtctagggctgtgaggccacctccttgcacacctgaaaatgtttaaattggtattattctactgaaatggctgaggtggggtttggggtatcttgaaacaaatcaaactctgttactaattgagccctagctgggtgccaggccccaggtatgtgtgttgggagggagtgggctcttgaggcccaggagctgaggtttctgatagacttggggatgggattttggctgaaaaagaaagtcttttggggcaggagcttggaacccttgacccaaggagtcatggggaagatggggcaaggaggggtgggaaaataggtaattcatggctgcttctctaagatgtgcctgcctagccccagtaaacctacctccctccatccctgccaggccatggtggcgtgttacccaggcaacgggctcgggtacgtaaggcacgttgacaatccccacggcgatgggcgctgcatcacctgtatctattacctgaatcagaactgggacgttaaggtaggggtgagggtgagggtgagggtggcgctggggctagggctggggcgggggtggcgtgcgtccactccattttccactctcagcccagattctggcattctcctgtttctcttctcaacacacagcgggcagtgcgatctgccggctcttcctgggaaatggcacctcctcctctctagcggactgtgtggtgggaactcccctctttccgggaatggtgctgtctgcccagccccacccggccttgtaatgaacactttcccccttttcctgtctttagtagcttcctgcccatctccatggtgatgcagtctctgggttgtcattcactttgagagcccgaggggtgggagggagtgatgcaggcagacgctgcgcctcctagtgggctcccggggcaccgtgggaggcagcggctcctggccgtaccagctagcctcatcctttggcctgcccccaggtgcatggcggcctgctgcagatcttccctgagggccggcccgtggtagccaacatcgagccactctttgaccggttgctcattttctggtctgaccggcggaacccccacgaggtgaagccagcctatgccaccaggtatgacctgtacttctggagacgcacccaggtgctccccctgtgacaatgtcctgtcagagcctcagagtgactagggagcgacgaagtattgagagggggcctaggtgggagcagaaccgggtggctcaaaaggatggccgcctagtgtgtgtggatatggtagctggaattgcagaaaactaatgtccaaccaccctggtctccaggtacgccatcactgtctggtattttgatgccaaggagcgggcagcagccaaagacaagtatcagctaggtacctgcttccctcccttcagtccttcctattctgtgggccctcttgggcctgatgccaccccatccccctcatcagcctcttgttaaatcccaccactcatttttcttcatctctgcccaccttccttagcccactctcctggtaccccaacaggagccccatttcttcctggtcctctccccatctccccaggtttcccttggcttctttgtccttctgatgactcactgtctcctgtcccctctcacccccagcatcaggacagaaaggtgtccaagtacctgtatcacagccgcctacgcccacctagtggccagtcccagagccgcatggcagacagcttaaatgacttcaggagagccctgggcctgtgctggctgctccttccctgccaccgctgctgcttctgactttgcctctgtcctgcctggtgtggagggctctgtctgttgctgaggaccaaggaggagaagagacctttgctgccccatcatgggggctggggttgtcacctggacagggggcagccgtggaggccaccgttaccaactgaagctgggggcctgggtcctaccctgtctggtcatgaccccattaggtatggagagctgggaggaggcattgtcacttcccaccaggatgcaggacttggggttgaggtgagtcatggcctcttgctggcaatggggtgggaggagtacccccaagtcctctcactcctccagcctggaatgtgaagtgactccccaacccctttggccatggcaggcaccttttggactgggctgccactgcttgggcagagtaaaaggtgccaggaggagcatgggtgtggaagtcctgtcagccaagaaataaaagtttacctcagagctgcacacatctga

SEQ ID NO: 1587 - DNA, 1182 bp, Homo sapiens
ccatctgcaatttagggcctttattgaccgaggagggtatggaggtttgagggccagtgagcccaccatagtggagcctgacctcagcaggccactggctggagctggaagtctggggggacactgcccaggccagtgcactgcaggtgaggttgatggtgccagggcgtaccacagggagcaggcagaacctctgtaaggtggccgtaaggaataggaagatacccgagtgggccaggcctgtgcccaggcacatctgctttgccgggtacacaggtgcacagtgagcaccaggtaccccagagccagtccaggctggtccccttcctcctctgcctgcacctgaggcaaagggcatgaaagcatcattgccctggaacttgcccttgtccaggaagttggtagggttgaagcagtctgggtctttgaattgagtggggtcccggtgtgcagtcacaagcaggggaatcacaaaagtgccctggggatacatgcaacttgggttacctgcgggcttggtgagcacctgcaccacctccatccaagacgctttttaaaagcccaagggaataggccgggcaagtcatcacgcctgtaatcccagcactctgggaggctgaggacagatcacttgaggtcagaagttcgagaccagcctggccaacatggcgaaacctgtctctactaaaaatacaaaaattagccaggcgtggtggtgggtgcctgtaataccaggtactcaggaggctgaggcaggacaatcgcttgaacccaggaagtggaggttgcagtgagccaagatcatgccactgcattctagcctgaatgacagagccagactccgtctcaaacaacaacaacaaaaagcctaagggaaggcagagctgccttcctgctccaggggtaactgattgtgttttggtctgcacagcgcacacctgctgattctggctgatctcatgcacccgggtcccgcacgatccccagactcagtgggtacctttgggcagacagtggctgtgcaggtgggtgtcgagggtgagggtgcgcggcaccccaggggcaccacgctgatgaagcactggatctcgagcagcactgcgttggcgtagggcaggcacacgcgatagtccaggcttggggcgggcctccaccctaccacagggtccagctcctgcacct

SEQ ID NO: 1588 - DNA, 1186 bp, Homo sapiens
ccatctgcaatttagggcctttattgaccgaggagggtatggaggtttgagggccagtgagcccaccatagtggagcctgacctcagcaggccactggctggagctggaagtctggggggacactgcccaggccagtgcactgcaggtgaggttgatggtgccagggcgtaccacagggagcaggcagaacctctgtaaggtggccgtaaggaataggaagatacccgagtgggccaggcctgtgcccaggcacatctgctttgccgggtacacaggtgcacagtgagcaccaggtaccccagagccagtccaggctggtccccttcctcctctgcctgcacctgaggcaaagggcatgaaagcatcattgccctggaacttgcccttgtccaggaagttggtagggttgaagcagtctgggtctttgaattgagtggggtcccggtgtgcagtcacaagcaggggaatcacaaaagtgccctggggatacatgcaacttgggttacctgcgggcttggtgagcacctgcaccacctccatccaagacgctttttaaaagcccaagggaataggccgggcaagtagctcacgcctgtaatcccagcactctgggaggctgaggacagatcacttgaggtcagaagttcgagaccagcctggccaacatggcgaaacctgtctctactaaaaatacaaaaattagccaggcgtggtggtgggtgcctgtaataccaggtactcaggaggctgaggcaggacaatcgcttgaacccaggaagtggaggttgcagtgagccaagatcatgccactgcattctagcctgaatgacagagccagactccgtctcaaacaacaacaacaaaaagcctaagggaaggcagagctgccttcctgctccaggggtaactgattgtgttttggtctgcacagcgcacacctgctgattctggctgatctcatgcacccgggtcccgcacgggatccccagactcagtgggtacctttgggcagacagtggctgtgcaggtgggtgtcgagggtgagggtgcgcggcagccccaggggcaccacgctgatgaagcactggatctcgagcagcactgcgttggcgtagggcaggcacacgcgatagtccaggcttggggcgggcctccaccctaccacagggtccagctcctgcacct

SEQ ID NO: 1589 - DNA, 4048 bp, Homo sapiens
gcagtgacgagggaaacctctcgctgagggttggggcaaagtcacccctggaaatcgaaggggccgctggtggtctcttgaggtccaccagcctcaaatgcatctcttcagacggtgttgggggcacaaccctactccccgaaaagtcgaaaacccaattcagttcctgcgagtccctcttagaatccagaccgagcatggggagaaaactgagctctccgaccacacccagggacatgctgttgtcgcccacactgcgtcctcggaggcggtgtctggagtcctctgtggacgatgcgggctgtccagaccttggaaaggagccgcttgttttccagaaccgccagtttgcccacctgatggaggaacctctaggcagtgacccattcagctggaaactcccaagcctcgactacgaacgcaagaccaaagtggacttcgatgacttcctcccagctatccggaagccccagacacctacctccttggctggatcagccaaaggtgggcaagacggttcacagcgttcaagcatccactttgaaacggaagaggctaaccgttcctttctctcggggatcaagaccattttgaagaagagcccggagcccaaggaggatcccgctcacctgtctgactcgtcctcatcctccggctccatcgtgtccttcaaaagtgctgacagcatcaaaagtcgaccaggaatcccacgacttgcgggtgacggtggcgagcgaacgtcccccgagcggagagagccagggacggggaggaaagacgacgatgttgcgagcataatgaagaaatacctccagaagtaggaaccagttcaggtaaaagcaacaggctggggctattcttgggggaatgagagttcaccttgcagccttggggagagcaggtgccactactgtccttaatgccacaaccgatttctctagagaccaagatttttagaggttttagctgaagtcatgtgttgatggatgcaaagcttttcagaacccctctgctgggtacctctacttccttgtactttgaaatgcagacacatcagaaagtaagaggttcctgtgggataccgctaaagaaggtgccagatgtagccgggcgcggtggctcacgcctgtaatcccagcactttgggaggccaaggcgggtggatcacctaaggtcaggagtttgagaccagactggccaacagggtgaaacctcgtctctactaaaaatacaaaaaattagccaggtgtcttgacgggcgcctgtaatcccagctactcaggaggctgaggcaggacaatcgcttgaaccagggaggcagaggttgcagtgagctgagggtgccaccactgcactccagcctgggaaacaagagcaaaactctgtctcagggaaaaaaaaaaaaaaaaggtgccagatgtttaaagttacctcaccctactgtcattttcttttcttaatgtcattccacctgggtttgaaggagctgtgatggcgttctgtccacataatgacagaagatccgtggtgggatcacagacatgcaaagggccaagttggaagagaccttcagaatagtggagtccacttgcattgcatatggagagaaactgaggccctaggttcaggggggagggaacaagtacaaaaatcacagagcaacaatgcaggataagtaactacttgctgcccttcctccctctcctagcactcatcctgccactcatctggagtcaaggtaagaagaggaattcaggccgggtgcggtggctcacgcctgtaatcccagcactttgggaggccgaggcgggcggatcacgaggtcaggagatcgagaccatcctggctaacacagtgaaaccccatctccactaaaaaaaaatagcagagcgtggtagcgggtgcctgtagtcccagctactggggaggctgaggcaggaaaatggcatgaacccgggaggcggagcttgcagtgagccgagatctcgccactgcactccagcctgggcgacagagcgagactccgtctcaaaaaaaaaaaaaaaaaaaaaattcattgctaaccaaggcttacatttattgagaggacacatcagacagtcatttagtactcctgatatccccaagcagtggtgaatgttatttattcccatttaccaggttgacagactgagtatcagaaagattaaagtcacttgtacagaatcaccagggcataattgggtttccagctctagaatccctacatttatctttaaaagttttccctagggacacattccaggcatcttcatgagtgaaattagagctgtctgatagcgtatgagccttcgtaaatctcccagtcactgaatctcagaacttgctgcagctcaaggctctgatggtccagcgactgcacatggctctcagggtgcacctgctgccacccccaggcctccttgacccaaatgaggcacacgtcctctatttctttgagagacagcctcagcccatcaaaaagccattgccccttccgtggagacaggtttggactctatcagagcaaactaatttgacttaacatggccttctctctgctctcaattaccgagtaaagatctgatattcatttacattattatgctctcggggacacagaaagcagtttcaaaggccaagtaaagggcacacatccatgaggggaacagtccttagcagaagtcatcacagaacatcttgtctctgccattccgttttaaactcaagtcctccttccctaccctgagcaaggttcttctccaaggatgctagtttttcagctatacaatgcaacacctccaacgatgcaaatgcatggtgggctttggaaccaaacaagaccccccaaagctcagttctgccctgtaactagccattggaccctaggcaagtgatacagtctcaccaagcccctgtgtcctcagttggaaaacaggggtaagaataccaactacctaaagtaacgctgtggatttcatgagaatatgagagattcctggaatagagcatggcaccccatggatgcagtaaatgccaggttactttggaatttttggacctttgggaaatctatcccaactttttctccttctgccacctacactctgccatccctttctgtggagttgctacagtaacgccacctgggtatacagaattccaggccctccaccccattcattgtctctatcaaaatgtacccatcttcctggccaggcacagtggctcatgcccataatcccagttctttgggaggctgaggcaggaggatcacttgaggccaggagtttgagaccagcctgggcaacatagtgagtccccacctctacaagaaatacaaaataaaaaattagctgggtgtagtgacatgcacctgtaatcctagctacttgggaggctgaagcaggaagatcacttgaacccaggagctggaggctgcagtgagctatgattgcaccactgcacactagcctgagtgacaaagtgagaccctgcctccagaaaaagaaaaaccttacccatcctttgtcccattcatcaactctgacctatgtttgcttccagcctccttgaagctgcccttgaagacttcccgactctacaataacttggagacagagagactggccaggcctccccggtggccagagccagccagcatggccaccctcaagaggcgagatgagcccacagaggcatatcctgcggggatgctgggctcccagtgtggttggcctgaacaaaataaagtgttgactcctgggcatctgtgccttctctatggccttgctacctgggattccagagagttgatggggtgcagataggggtaggactgttagaatagaaccaacccaaactgtgtgtagtttggggtgtatacttctatttctcttcctacatgtctacatgccatgaccttcctcctcctcttcacttggccagtttcagctcacttcctccaggaagtctttcctgatatatcaaactgaaacaaatgctcctcctccatgctcccttaatcccc

SEQ ID NO: 1590 - DNA, 163 bp, Homo sapiens
ggcgaagtgcttgccgtccagagaaagtccacagagagattagaacctgcttcctctcccctggcttctcggagtacaaatacatccccgctgtcgagggaaaagctgcccagtccttcagcggccctctcggagttcgtggaagggctccggaggaagagag

SEQ ID NO: 1591 - DNA, 1786 bp, Homo sapiens
gatggacatttgagttgctgccaccttttggctattgtgaatggtgttgctgtgaactttggcttacaagtatctgagtccctgctttcagttcttttgagtggaatttgctggatcatatggtaattccgtgtttaacttttggaggaactgccaaactgttttctaccgtggctgtaccattttatattcccaccaaccattgatttagtttgacttctgttgtttaaagaagtatatctgaattttacacatactccaaaactgtaattatttgaattaattggagtagaaattaatttgaaataatgaaatgtctgattactggacatcaaaagctgctttgcattaggccatggttctcagaattcacaatcctcctttccattttttcctccctccctcccttcctcctctcgctaccatggtcactctcagcttcacaataagcacgtgtatcttagggcatttgaacttcaaatactacagcacctcacacgtaagaactctgtaacagtagacctctatttccctttcctgtcctatgtgctacttttttgttttgtttttttgagacagggtcttgctttgttgcccaggcaggagggcagtggcgtaatcacagctcactgcagcctcaacctcctgtttaagcgatcctcccacttctacctgccaagtagctaggactacagatgcagaccaccatgcccggctaatttttgtatttgtagagacagggtctctccacggtgccctggctggtcttaaattcctgagtttgtgcgatctgtccacctcggcctccaaaatgctggggttacaggcatgagccactgtgcctggcctttgtatttttgtcatacattttatttcccagtattatagactccagaatatgttgttgttattgttttaaaagtcagttatcttcttagttttctttcagaaaaattaaatggtgagtttttttgtttgtttgtttgtttgttttgcatggcccatgtatttaccattcctggtgctcttccttcttttgtgtggattcagttttccatctagtatcattttcgttctggtaaaagcatgtttgacatttcctgtagtattgctttgctggtgacacattcttcctcagcttttgtctgaaatgcctttatttcaccatcatttttgaaggatgtttttgctgggtatagaattctaggttggtagtttttgttatttttcagcatttttaaggtgacatttggcttgtacatgttgttcttgagaattctgcagttattctttgttccactgtatgtaataatatatgtttttctcctttctctgattttacggtttttctctttgttgctgatattctgaaacttgactatgatgtgtctttgtgtggttttctttgtggtttttttcctgtggaatttattcaacttctgggatctgtaggttatagttttcacaaattggaaatttttgacattacttcttcagacactttttctgtcttcccctccatcattctgggatttgaattacatgtatacagtaactgttgttgtttcataggtgactaactgggtaggggaatgtctggttcccttactatccggtgaagtagcagaaccaccttttgtaggaatcagttatcaggccctttactttcccttgaactctaggctagttccagaacctttggtggactggaaagaggaaatagttatgccacaatttttagtacatgcaaatgtacatgtaatgtttaaaaaaaaaaaacaacaaa

SEQ ID NO: 1592 - DNA, 141 bp, Homo sapiens
cggagcctcactctgtcacccaggctggagtgcagtggtgccatcttggctcactgcaccctccacctccagggttcaagcgattttcctgcctcagcctcccgagtagctgggattacaggcgttcgctaccacacccag

SEQ ID NO: 1593 - DNA, 1413 bp, Homo sapiens
ttctgggaaggggtgtgatgcattaaggagatggtgtctgcatggtgccaccgcaggccatggccagctggatctgtgtcttctgcaccagcccatctggatgcagtgcaacctgtctggtctgctatcctgcgttcccctaactggcaccctcctgggccagccagcagcaggacatagaccaaggccaacctcctccacacccagggcctctgccttctaccctctgtggagtctccattaacttggcattgacagggctgcttgactcaaaacaaccccagccctgccctgaagccatctcgccagtcagtcagagctcaagactctctctttctctggagaagagcaggaaagtaatcccagctaaccctcatgcagccaccactctgtgtcagaatctcttctaggccattgcattgaataagtcatttaatccatataaacctgcaaggagtaggtgatattgttaaccccattttataggcgaggaaactgaggcatggtgaggttaagtgaccagcaaggtggaaatctgaggtttgacccatctcctggtgtggagtccagttctctcagcttcactgatccttcctgatttgtgctgagttagggaccccttgggaagcccccatgggcagggggtgctggtgctagcatttcctgtggattatgggagggggatgtgtggaggacctgtgtctactgttcctctagcctctgggggatttggagaacccactctgcccagagatgtaagtcatctttggatatagatgagacttgttccccctccccctgaatcccagggcacagctctatggaataagctctagctggaacttgtaaagtttggcccagccctccctgggaggctaggaggtggggaagagccaggagactcgaagtggtggtggtagttaatgtctatgtggttagacgttaaccagttactctgtggtgccaggcactgtcctaggcacgctatagttatcattgtctcctttggtgcccccagacagcccagggtcaagacaggtagcctcagtttacagatgcagcagtggaggcttgcacaatgagtaggtggctttgttcaaatcacagacctaggccaggtataaaagcctaagtgtggtgtaattccagcactttgggaggccaaggcggggagattgcttgagtccaggagtttgacaccagcctgggcaacatagtgagaccctgtctctacaaaaaaaaaaaaaaaagaagaagaaaagaaaagaaaaattagcctggcatggtggcatctgcctgtagtcccagctactcaggaggctgaggcaggaagatcacttgagccagggaatgtttgaggctgcaatgagctgtaatcacaccactgcactccagcatgggcgacagagtctc

SEQ ID NO: 1594 - DNA, 1411 bp, Homo sapiens
ttctgggaaggggtgtgatgcattaaggagatggtgtctgcatggtgccaccgcaggccatggccagctggatctgtgtcttctgcaccagcccatctggatgcagtgcaacctgtctggtctgctatcctgcgttcccctaactggcaccctcctgggccagccagcagcaggacatagaccaaggccaacctcctccacacccagggcctctgccttctaccctctgtggagtctccattaacttggcattgacagggctgcttgactcaaaacaaccccagccctgccctgaagccatctcgccagtcagtcagagctcaagactctctctttctctggagaagagcaggaaagtaatcccagctaaccctcatgcagccaccactctgtgtcagaatctcttctaggccattgcattgaataagtcatttaatccatataaacctgcaaggagtaggtgatattgttaaccccattttataggcgaggaaactgaggcatggtgaggttaagtgaccagcaaggtggaaatctgaggtttgacccatctcctggtgtggagtccagttctctcagcttcactgatccttcctgatttgtgctgagttagggaccccttgggaagcccccatgggcagggggtgctggtgctagcatttcctgtggattatgggagggggatgtgtggaggacctgtgtctactgttcctctagcctctgggggatttggagaacccactctgcccagagatgtaagtcatctttggatatagatgagacttgttccccctccccctgaatcccagggcacagctctatggaataagctctagctggaacttgtaaagtttgcccagccctccctgggaggctaggaggtggggaagagccaggagactcgaagtggtggtggtagttaatgtctatgtggttagacgttaaccagttactctgtgtgccaggcactgtcctaggcacgctatagttatcattgtctcctttggtgcccccagacagcccagggtcaagacaggtagcctcagtttacagatgcagcagtggaggcttgcacaatgagtaggtggctttgttcaaatcacagacctaggccaggtataaaagcctaagtgtggtgtaattccagcactttgggaggccaaggcggggagattgcttgagtccaggagtttgacaccagcctgggcaacatagtgagaccctgtctctacaaaaaaaaaaaaaaaagaagaagaaaagaaaagaaaaattagcctggcatggtggcatctgcctgtagtcccagctactcaggaggctgaggcaggaagatcacttgagccagggaatgtttgaggctgcaatgagctgtaatcacaccactgcactccagcatgggcgacagagtctc

SEQ ID NO: 1595 - DNA, 498 bp, Homo sapiens
gctgacccagagttctgaaaggtcaggggagtctggagggtgaggagaagctctgccccggaggtgacatttgaactagtctctgaagcgccagagttctccccaaaggaaggaggtcattcaagaatgaggaaacagggcgcccaggcgatgggctgtggtgtgtcctgggagcagccaatgatcagcagagtagaggcagcgagtgttgacccccatagcaaaaaatgagtgctggggtctggagtcctccctcctccttaaccctcctctgttatcaaagactcaaggttaactcaccttacgtcttctccctacaagtcaggctcagggaggggagcagataccctgcttgaggacccccaggaaaccagttcctctttccttcttgtggagggagtgcctgggctctgggcagggaagacccccacagagggtggagtccagctccaggagaggcagcctgggcagggaggggctgctctcccggctgggcgt

SEQ ID NO: 1596 - DNA, 498 bp, Homo sapiens; identical to SEQ ID NO: 1595

SEQ ID NO: 1597 - DNA, 5088 bp, Homo sapiens
  misc_feature (5)..(304): n equals a,t,g, or c
  misc_feature (3943)..(4892): n equals a,t,g, or c
tattnnnnnnnnnnnnnnnnnnnnnnnnnnnnnnnnnnnnnnnnnnnnnnnnnnnnnnnnnnnnnnnnnnnnnnnnnnnnnnnnnnnnnnnnnnnnnnnnnnnnnnnnnnnnnnnnnnnnnnnnnnnnnnnnnnnnnnnnnnnnnnnnnnnnnnnnnnnnnnnnnnnnnnnnnnnnnnnnnnnnnnnnnnnnnnnnnnnnnnnnnnnnnnnnnnnnnnnnnnnnnnnnnnnnnnnnnnnnnnnnnnnnnnnnnnnnnnnnnnnnnnnnnnnnnnnnnnnnnnnnnnnnnnnnnnnnnnnnnnnntgagatagaatctcactctgttgcccaggctggggtgcagtggtgcgatctcagctccccacaacctctgcctccagggttcaagcaattctcctgcctcagcctcctgagtatctgggattacaggcatgcaccactacgcttggctaatttttgtatttttagtagagacggggtttcaccatgttggccaggctggtcttgaactcctgacctcaggtgattcgcccgccttggcctcccaaagtgctgggattacaggcatgagccaccgtgcctggctgaaagttcattttcaatagcatagtccagaccattttttttctaaatgtgctaccagaatcaaagaaataataacattccattaaaacaaataaaatggcattaaattaaatgttctgcataatttaagagccctgaccaattttagtcttttttttttttttgagacagagtctcactgtgtcgcccaggctggagtgcagtggtacgatcttggctcactgcagcctccacctcctgggttcaagtgattctcctgcctcaacctcccgagcagctgggattacaggcatgtgccaccatacctggctaatttttatatctttagtagagatggggtttcaccatgttggccaggctggtctcaaactcttgacctcaggtgatctgcccgcctcggcctcccaaagtgctggcattacaggcatgagtcactgcgcctggcctagtctattattaacaaataaaaattttaatacataaaaatggatggatattttctagagccttaattaagtaattcactccaaatgtcttttttttttttttttttagctagtaagtggagacactttgaaacatggtgcttaaaaaaaaacacactacctacctggtgggctgtttcatggtgaaataacttattctgtataatttgaatgcaattcagatactatgtagatgttaaaaagctaagttaacataaaatgtacatcatgaaacgtcaccttacttgacggcattaatacattttttccactaaaatacttgtaaccatggccatcagtatgaagaaaaattttaaacacgatgaaaggtggaaacgtttcacctctaaatctgaaataaagataaaaatttagttatttggcatcaggttttgggctcagttgcttttcccccttatacttaagatagttcatatagtttcttgcatacagggtaaaggctatgtcagagcatgtaaagaactggtaatgaaatggatcacataggatgtaagacccacactttggtgtactcacaactattctcatacctgtgtaagactgaatacagaatgggagatgagagctactctcatggcaacttttagccacagagtcatgcctcggtttctttacataacaaatgtaaataagaataacacatttactttgtaattaagttctgagaagttacaagaatttaaaaaatccatatctaagatttcctcatattaactaagtacttcttgaaataaatcagcatagatacattacctgaatctaattttacactgcatagtaggatccttaataagcttagcctctaagggggccactttcttcagtatttcatgtgttacatagaattcctgaaataaaggacagtgctgtaaaaggaaagcagtatcccacccagacacaatttatggactataacagaggcaacgtggtaaagtgaacattatgctggacttggagttctgaaggggtgggtttttgttttggcacctccacttactatctgtgtagccttgagccagttacttaatcattttggcctccaactttggttatctgtcccttttagagatcaaaggcactattatttccctatgacagcacttttcacaatatattataattacttatcaacttgtctgtgcctcctactagactgtaagcttcatgaaggtagggatggtggcttttctctttaccactatattcctagcatctaatacagtgcctggaacacagcagatgcttaagaagtatttgttgaatgaatcactgtaagatgaggatgataatagtaataagttactagcttttaagcaccttttatgtaccatatactactatgttaggtgccttatatacattagctcatttaatccttacatcagcaacactatgagaattttttgtttgttttgagacagagtctcgctccgtcgcccaggctcgagtgcggtggcatgatctcggctcactgcaacctccgcctcccaggttcaagcgattctcctgcctcagcctcccgagtagctgggactacaggcacctgccaccacgcccggctaattttgtattttttcagtagagacggggtttcaccatattggccaggctggcctggaactcctgaccttgtgagccgcacgcctcagcctcccaaagtgctgggattacaggtgtgagccaccactcaggctgcagtgcaatggcatgatctcggctcaccgcaacctccacctcccaggttcaagtgattctcctgctcagcctcctgagtagctggaattacaggcatgcgccaccatgcctggctaattttgtatttttaatagagatggggtttcttcatgttggtcaggctggtctcgagctcccgacttcaggtgatccacccgcctcagcctcccaaagtgctgggattacaggcgtgagccactgcacctggcccattatgagaatattatcacgcctattttacagatgagaaggctgaggctcagggaatttttgtaatttataaaaaggcatacaggtagtgaatggggaagccaggattcatttagttctgtttgactctaaagtcccaactctttcccccaaacaaccccaaccaaccccgttatgcctatgataatcacataaaaatgtacactaaagagcttttaggctgggcactgcggctcacgcctataatcctggcactttgggaggccaaagcgggaggatcacctgaggtcaagagttcgagaccaacctggtcaacatggtgaaaccccatctctactaaaaatacaaaaattagccaggcgtgatggcaggcgcctgtagtccaagctatttgggaggctgaagcaggagaatcgcttgaacccgggaggcagaggttgcagggagccgagatcgtgccactgcactccagcctgggtgacagagcaagactctgctcaaaataaataaataaatagcttttaaaaggacaaagcattattaatttaaggtattaaagtattactataacagataaaaaagaatttccttctgttacaaaagtctaaaaatactatgaaaccagcattataaaattaaatacaagttccatattcaaagacaatggataatagacctgaaatgccaggagtttacctgggtgggttttctctgaagtattcagacggagtcttgctctgtcgcccaggctggagtgcagtggctcaaactcggctcactataacctccacctccccggttcaaggtagctgggattacaggcgcacaccaccatgcccggctaatttttttgtatttttaggagagacggggtattcaccatggtgaccggactggtctcgaactnnnnnnnnnnnnnnnnnnnnnnnnnnnnnnnnnnnnnnnnnnnnnnnnnnnnnnnnnnnnnnnnnnnnnnnnnnnnnnnnnnnnnnnnnnnnnnnnnnnnnnnnnnnnnnnnnnnnnnnnnnnnnnnnnnnnnnnnnnnnnnnnnnnnnnnnnnnnnnnnnnnnnnnnnnnnnnnnnnnnnnnnnnnnnnnnnnnnnnnnnnnnnnnnnnnnnnnnnnnnnnnnnnnnnnnnnnnnnnnnnnnnnnnnnnnnnnnnnnnnnnnnnnnnnnnnnnnnnnnnnnnnnnnnnnnnnnnnnnnnnnnnnnnnnnnnnnnnnnnnnnnnnnnnnnnnnnnnnnnnnnnnnnnnnnnnnnnnnnnnnnnnnnnnnnnnnnnnnnnnnnnnnnnnnnnnnnnnnnnnnnnnnnnnnnnnnnnnnnnnnnnnnnnnnnnnnnnnnnnnnnnnnnnnnnnnnnnnnnnnnnnnnnnnnnnnnnnnnnnnnnnnnnnnnnnnnnnnnnnnnnnnnnnnnnnnnnnnnnnnnnnnnnnnnnnnnnnnnnnnnnnnnnnnnnnnnnnnnnnnnnnnnnnnnnnnnnnnnnnnnnnnnnnnnnnnnnnnnnnnnnnnnnnnnnnnnnnnnnnnnnnnnnnnnnnnnnnnnnnnnnnnnnnnnnnnnnnnnnnnnnnnnnnnnnnnnnnnnnnnnnnnnnnnnnnnnnnnnnnnnnnnnnnnnnnnnnnnnnnnnnnnnnnnnnnnnnnnnnnnnnnnnnnnnnnnnnnnnnnnnnnnnnnnnnnnnnnnnnnnnnnnnnnnnnnnnnnnnnnnnnnnnnnnnnnnnnnnnnnnnnnnnnnnnnnnnnnnnnnnnnnnnnnnnnnnnnnnnnnnnnnnnnnnnnnnnnnnnnnnnnnnnnnnnnnnnnnnnnnnnnnnnnnnnnnnnnnnnnnnnnnnnnnnnnnnnnnnnnnnnnnnnnnnnnaaaaaaaaaattagctgggcatggcggcacgcacctgtagtcccagctactagggaggcggaggcaggataatcccttgaacctgggtggtggaggttgcagtgagccaagatcatgcccctgcactccagcctgggcaacagagtgagacttcatctcaaaaaagaaaagaaaaaaaagagtatcactaataata

SEQ ID NO: 1598 - DNA, 1191 bp, Homo sapiens
aaaaaatgtaagctgaaatgatgacgtgttcttttagaaggtttatcatagcaactactataggcagtgattctaagaagatgctattctttttttccattgctttgtctagttttttttttttaaatctgtttttgtgcctttgtaattctagggttattggtatagttctcaccatatcttgaatacagatgctttttcctttggaaataatttctcataaagcacattgcttatagctgcttcccttttcccagagtagtaaaagttgtgatacaagacagtgatatcagctgggcgtggtggcacacgcctgtaatcccagcacgttgggaggccaaggcaggcagatcacttgaggccaggagttcgagaccagcctggccaacatggtgaatccccgtctctactaaaaatacacacaaaaaattagctgggtgtggtggtttgtgcctgtagtcccagctactcgggaggctgaggcacgagaattgcttgaaccagggaggtggaggttgcagtaagctgagattgcaccactacactccagcctgggtgacagaacgagactctgtctcagaaaaaaaaaaaaagagacaatgatatgaaaaggtcttacatgaatgagttttacgcatgattcaatctgtaagtcctataaattatttttgatggatggtatctattttcttcctattagtagtttggggcaaaaataaatttaactgaatgtaaaaatattcagctctatggggagctgagaagaactaaatattttcagacacttgttatgtgcaggttgtttggcatatatttttaaaaatctttataataccattttgaattaaattctatccccatttaacaaatgaggaggtggtttctattcttaagtaactttcccaaaatcactcaattaagtggcaagggtgggatttaaatcgaagcctatactctttcacttgtttccaaagatgccaaactcaaaatgtggctaaacagtaaatcttgagcaaagaaatgatttactaggaagcagcacaatagaacatactggatgtaggaaatgttatatatcttgatctcattggtggtaacacaagtatatacatatgaaaaagttagttttatccttactgttagtactcagtgctcttattattcctcaaaaatgaaaaaaaaagtaaaaaa

SEQ ID NO: 1599 - DNA, 1192 bp, Homo sapiens
aaaaaatgtaagctgaaatgatgacgtgttcttttagaaggtttatcatagcaactactataggcagtgattctaagaagatgctattctttttttccattgcttggtctagtttttttttttaaaactctgttttggtgccttggtaattctagggttattggtatagttctcaccatatcttggatacagatgctttttcctttggaaataatttctcataaagcacattgcttatagctgcttcccttttcccagagtagtaaaagttgtgatacaagacagtgatatcagctgggcgtggtggcacacgcctgtaatcccagcacgttgggaggccaaggcaggcagatcacttgaggccaggagttcgagaccagcctggccaacatggtgaatccccgtctctactaaaaatacacacaaaaaattagctgggtgtggtggtttgtgcctgtagtcccagctactcgggaggctgaggcacgagaattgcttgaaccagggaggtggaggttgcagtaagctgagattgcaccactacactccagcctgggtgacagaacgagactctgtctcagaaaaaaaaaaaaagagacaatgatatgaaaaggtcttacatgaatgagttttacgcatgattcaatctgtaagtcctataaattatttttgatggatggtatctattttcttcctattagtagttttgggcaaaaataaatttaactgaatgtaaaaatattcagctctatggggagctgagaagaactaaatattttcagacacttgttatgtgcaggttgtttggcatatatttttaaaaatctttataataccattttgaattaaattctatccccatttaacaaatgaggaggtggtttctattcttaagtaactttcccaaaatcactcaattaagtggcaagggtgggatttaaatcgaagcctatactctttcacttgtttccaaagatgccaaactcaaaatgtggctaaacagtaaatcttgagcaaagaaatgatttactaggaagcagcacaatagaacatactggatgtaggaaatgttatatatcttgatctcattggtggtaacacaagtatatacatatgaaaaagttagttttatccttactgttagtactcagtgctcttattattcctcaaaaatgaaaaaaaaagtaaaaaa

SEQ ID NO: 1600 - DNA, 228 bp, Homo sapiens
tcgaggtcaggagattgagaccatcctggctaacatggtgaaaccccatctctactaaaaatacaaaaaaaattagccgggcgtggtggcgggagcctgtagtcccagctactcgggaggttgaggcaggagaatggcgtgaacctgggaggcggagcttgtagtgagccaagatcatgccactgcactccagcctgggcgacagagcgagactccgtctcaaaaaaa

SEQ ID NO: 1601 - DNA, 711 bp, Homo sapiens
aggagatgaaactagagatttgtgccaaattgtgaaaggccttgactgccttgcttcttgctaaacagtggaatttatcaacccactgagacaaagtcagttaagatttttgagccttccatatatttagctgcttatatttaatgtcttgtctttaaaaataacacgtatgacttgttgtttgcatgcttttgcatatataacttatttgaagttaggtgcttctactgattgactttgactttttgttcacaaaaatatagggatcttgatttatgactggaccacttaatgtattaatttgcactgtgttatatcctaaacttttaaaactactcatgactaatgtctttcaccaaactgttacctacgaactttctaaagaaatgtgtgacaaaggcgtgattagtttcatttgctctgccatttttagctgtatatgtgataaaacatgttttaatacatctctttttaacttcgattttatttggaatttttgaatgagctgtttgtttgtttttaagcaaagtaattggagtgaactttctttgattcccaggttttcttttttccccttttttctttttttattgcattggtagatgcagggcaagaaatttattactctaaatttgtgactcagaattttaaaactaaattaacttcataaatgcgctcacttttttcttaatgcattacgtctaaccccca

SEQ ID NO: 1602 - DNA, 374 bp, Homo sapiens
cctctctctacaagatggtataaaatttagtattattttaaagaaataatacctagcagcagtaacctggcagcccaaaggctgtatatggcccgtagatgtgtatatttatgtattttgtatcagcatttaaaactaggagattttgtattaaaatacaacatttagatttgttggaaaaatttaaaaagtctgacaaaactgtacctttatagtactcctttataggagtcagaggctggagtcaagtgttaactgtgttggacttgcttttcagtttgacagttcatggtatgccaacacctaggctgtttttcagttgccatttattatcatatgtgctctgctgcttttcttacgatagagaaacatgt

SEQ ID NO: 1603 - DNA, 710 bp, Homo sapiens
aggagatgaaactagagatttgtgccaaattgtgaaaggccttgactgccttgcttcttgctaaacagtggaatttatcaacccactgagacaaagtcagttaagatttttgagccttccatatatttagctgcttatatttaatgtcttgtctttaaaaataacacgtatgacttgttgtttgcatgcttttgcatatatacttatttgaagttaggtgcttctactgattgactttgactttttgttcacaaaaatatagggatcttgatttatgactggaccacttaatgtattaatttgcactgtgttatatcctaaacttttaaaactactcatgactaatgtctttcaccaaactgttacctacgaactttctaaagaaatgtgtgacaaaggcgtgattagtttcatttgctctgccatttttagctgtatatgtgataaaacatgttttaatacatctctttttaacttcgattttatttggaatttttgaatgagctgtttgtttgtttttaagcaaagtaattggagtgaactttctttgattcccaggttttcttttttccccttttttctttttttattgcattggtagatgcagggcaagaaatttattactctaaatttgtgactcagaattttaaaactaaattaacttcataaatgcgctcacttttttcttaatgcattacgtctaaccccca

SEQ ID NO: 1604 - DNA, 1646 bp, Homo sapiens
taaaaaaagaaaatacagtaagtagccacataaaccgcttctagctgggtccactggtccccctgcttcttgtttattaacggaatctgttcaggggctctagggctcagagctttaggggagtctgagcccttctccagccctggggtgatgggtcttgattgatccaggtcaaattctccacagatttaattctggccaatgaatatgagaagaaatgagaaggtggaaaggtgtcttagtctactttttgctgctataataaaaataccaatacatggggtaaattataatgaagagaaatttatctcatggagttctggaggctggggagtcccaaaatcaaggtgttggcatctggtgaggagcttcttgctgtccaccccatggtggagggtggaagggcagaaagagagagagggctggaggccaataggtggctgaactcatttttttatgaggaacccactcccataataacagcattaatccactcatgagagcagagcccccatgacccaaccatttcccattaggtcctacctccccacacccactgcactggggatcaagtttccaacacatggaactttgggagacacattcacgacatagcagaggaccactggagaaaggaaggtttttaaagattttttttaggacactatggaagtgatagccattggacatggatggtgtttttgtttttggcatgggaaaaggcttatacaactctggtcaacttggcaacactaatcaaaagtcaaaatctcctttgaccctagggatcccctactattaacagtattatatcttatagaacctaggtatttaggaaagaaaaaaatgttcaaagatgtattgacatttaataaaagcaaataactggacataacccagctatccaaatacaggctatcaggaaacactgtgaaggactttgaaataggtcttgcccactgcccccacccctgcctccaattactgagtgttctgtctaatctagcccacctttctgagttgattccctttcatttcactgcctttgagctactttacaattacgtaaattaagggaaactgataatgcagatgattcttgttcatagaaatgcaaattgtgaccaatggaatataactgattattgttctgcaggtatcagccaattttgccagttttgtaactacgaagcaaactcatttcagcattcctgctaggcttataattatttgttctttggattctcctttgagccaattaaagtgtcctactggttctctcaataattaacaagttaaatacaatcatctttaacatgttacttttatatttgtatgagtcataattttaacttctaaaaaaattatcctttaacaaggtagttaagtaaatttaatgttcatgtggtataatttacttagcagccctcttaaaacagttataaaaaccatatggcaacagggacaaatactcctgataaaaatggcaagtggggaaaaaagcagaaatgcaaaatttgtactacgttgtgattaaagctaaacgttgtaagtgcttagggcaagaaataggaaggagaaaaaaaattgaagttggatttgtttgttagggtggtaggatcctggattaaaaaaaaaaaacaaaa

SEQ ID NO: 1605 - DNA, 510 bp, Homo sapiens
gaggttcctcttcaaagactttcctccctgtctaattaagaataaatagtaacttctcttaggagcaaaacttattcaaagacctgtgctaacattcttaaatatctgctagccgtaataaagaaatcaatgtactttatgttcttagctcccacaatttagcctatttgccctggcaatgcttatactggtccaagcaagcattaggtcatagcctgttcctcttccttatctgaaggtgtttttacgtttctcagcattccacaagttacttcctccttcattctcctctgcctttgcctcttttaaaaagttctaagttgctagccaatcaggacaaatacagaatgtgaggtcccgttccagccaatggaaactggacacagcagtaaagtggacttgtcaagttataaatgaccctgtctcctttgttcggtgttctctcgtggcaaaactgctggcgagtgtaccctttctgcagaaagtataaaaatgaccttgctgaagaaa

SEQ ID NO: 1606 - DNA, 1972 bp, Homo sapiens
tcacccaacaatgtttttttcatgttgatcactttactaaagcgaacaattggggttttaccaaaattgtgaaggattttattcttccatacttatgtctgtgttcagggtcatacagattctactttttccttttagtttaaggtattctcttggagatttaatgtacttaaatttgaccacaatttattgagagcatattctgtgtcagacattgcactctgcactagatattcaggaatttctaaaaagaatgttaacattgctgttacatagtcagttactgatcacattcttttcctctcaacttttttcaaaataggaatctgcggtatgttttcacgtatggagttcaggtcaggcttaggggtccctgacaatgtgaatagttttaagctgggcctcaattcgtggtacccttatactaatttaacaagccgtggactctaggttccaccaaaaatattttgttccatcctctctggtttcagtccatggtgtacagaaagaaaactaaggaacttcagccccaaattgtcaaattttgctacttaagaaacagaagatttaaatctatcattttgtcttatattccagagttgactggttcctcctgtctttaacttcttgtccttgaagggtattctaattttcattcagaaatatgacttctcatagggtttgtgttagatattttcagggccagatggatatgatgttcccatttctgttttattgttaaactactattccttttgagctgtaatgaacaattcattctgagaggcaatatatgttttcagtaattgacttgaataaaagtaaatgttaaacatggagttactaagttaatacagtgggtattagtactaatttgttcaaattaagatagaattcttaatttgataaatagaattcttatattacagcatcagtccaattggattgatagtttgtagaaaggtaatttcttacatgaggaaagacaggttttctttctcttagcaaggtattaatgcaaaaatgacctcttcatttcctaccagcttccagaagggaaatgctggttaggaggtaaattcaatttactctacaagcaaacttcacatctgttatgctgaagtcagagtttatctttcttgttatgtggaacctagaaatataccatgaggaatactgaaaaataaactagcagaaattttgcgtgatgctgaggatttttagatggctgcaaaatgggtgaaagtaatataaacttaacaaagaatgttgtcacaactctctggaacttagtactgtttttcaactaacaaatggaagatttgtgagactaggtcgacttaatgtgatttcaatgcagtaattactgtgtggcatgggcatggtaagagataggccttttctagaaatattctcatctctgttttttttagttgctcttacttagatttatattaactcagcttcacattttcatttctttttattttattttaaacaatgagaaaaatactccacgatgtcactgatttagttatcagatttgctttatttctgtatataataggtaatgtgagtacaggaaatatatctgaaaaggttacttgtacctaaattttaagttagatcatttaaaaattacttataagtctcttgagtgttttatatagtagggcagatggaaaaacttatttgatattcatttttggtacctcttaggaaaataattgggaatgtattcagttggaaaaaatgttgagaagagtgttttatataatgattatttagtaaaacattaaaaataatttcttattctggaggtttatagacatcaaaattgacaaagattcatggattatacatttcatcaaggtacctttaagcgattttttaaaaaaaattctgactctaacaatgcatgctcattgtagagcgttaaaaatacaaaaacatgcaaaagaaaaaattaaaa

SEQ ID NO: 1607 - DNA, 105 bp, Homo sapiens
ttttttgtatttttagtaaagacggggtttcaccatgttagccaggctggtcttgatctcctgtcctcgtgatcctcccgccttggcctcccaaagtgctgggat

SEQ ID NO: 1608 - DNA, 949 bp, Homo sapiens
gtcatgtttaagtggggataatgacattggcatacctgcttgctagagttaatgtgtgggtcatgagataacgaatataacaaatatttggaaaagtactatgttgaaatattttaaaataaaatttaaatccctcttcatttagaaaggatttgaggcagctaaatgcagaggtgtaagatggttttttggttaggattgtttctgagctgtgactctgtagtcactttcttactcagccctgccactcagctgtattcctctgtagctctgggcagacgactctgaacacggcttcatattggccttccatgagtgggtgaagggcatagtcatctggcagttttacctgctgttctatgcatgtctctccagcgcttgcttattttccccttctgcaaacattccattcatgccatgggcattcagtacagtcctgtaagcaagggtaggggcggcacaccaggtggatttaagcgcaaagacaggacgactgctttgccacaggcgcctttacagccagcagtgaacagttagacatattcaccttcctctaggtggaaaacagtcctcttctcagtagccctctcatgttcttgagacccatttgatataaataacaatgttgcaggaaatttcctgaaggaactgaaatgaaccatagaaacgagatcattcttttcctaccacacagctgggattagactgcttagtttgtacttgcagcacttttgcagtatgggccgtattaaaaaaaaaaaacatttaacactcagctatgggtacaaagatagtcactgaaacattattatttacttttatttatatatttatttttgagatggagtctcgctctgtcgccaggctggagtgcagtggcgcaatctcggctcactgcaacctcagcctcccaggttcaagtgattctcctacctcagcctcccgagta

SEQ ID NO: 1609 - DNA, 1359 bp, Homo sapiens
aattttggtttttgttttgttttgttttttgagatggggtctcgctctgtcgcccaggctggagtgcagtggcgcaatctcggctcactgcaagctccgcctcctgggttcatgccattctcctgcctcagcctccagagtagctgggactacaggcacccaccaccacacccggctaattttttgtatttttagtagaggcggggtttcaccgtgttaaccaggatggtctcgatctcctgacctcgtgatctgcccgcctcggcctcccaaagtgttgggattacaggcgtgagccactgcgcccagccaattttggtatttttagtagagatggggtttcaccatgttgaccaggatggtctcgatctcttgacctcatggtccgcctgcctcggcgtcccaaagtgctgggattacaggcatgggccactgcacctggctgcattattattattattattttattttgagttagggtcttgctctgttgtccaggctggagcacaggggtgcagtcatagctcactgcaggctcgaacctccaaagttcaagtggtctttctgccccagcctcttgagtagctggaactacaggtgcacaccacctggctaattttttattttttgtctagaggcagggtcaccctatgttgccaaggctgatcttaactcctgggctcaagcaatcctcctgccttttcctcccaaagttctgggattacagacatgagcaactgcttctggcctgaagcattaagagcaaaaagaaagtggtaatcaccatgtactgatatggatatagtaccaagatatgttattaagtgaataatgcatgttacaaaacagtgtgcataatatgatgcattttgataaataaatttatgtatatatgcacatattgttttctctggtaggaaagaaaagcataaacagggtttctctttgatggatggagtggggtagtgaggggagaagttcttatttttccatttaatactactccttggtgtttgaattttacagctgtatacagtattaagttttttttttttttttgagacggagtctcgctctgtcacccaggctggagtgcagtggcacgatctcggctcactgcaagctctgcctcccgggttcacaccattctcctgcctcagcctcccgagtagctgggactacaggcgtccgccaccatgcccggctaattttttgtatttttagtagagacagggtttcaccgtgttagccaggatggtctcaatctcctgacctcatgatccgcccccctcggcctcccaaagtgttaggattacaggcgtgagccaccgtgcccggccagtatgaagtatttttaaa

SEQ ID NO: 1610 - DNA, 294 bp, Homo sapiens
tcttggcctcccaaagtgttaggattacaggtgtgagctaccactcctgaccccaagacaatatcttaactgtaaaaattaaactctaccatattttaaaaagctgagatagtataaatgtttataataaaacataaaaccaacatttctcacaagtctttgtaactagtagagactgtagttgttctgtccagatataagtgtggtatatcaacttggcacttagcaacattgatatttaatttgttaaatttttgttaggaagaggtgttttcagatctcaggtgtctttgg

SEQ ID NO: 1611 - DNA, 4400 bp, Homo sapiens
gggaccccaggcttcctttgagacatccaccagcggtgatgggttgggaccaatctcccccactcctctccaccctagcagtaaggtccccgctctcgatactgccccagcacctgcactggccctctctgatttcccaactccagcccattccaagtgctgaaggcgggtcgctaggtgctgggacctgggcgcggggcaagaccttgggctgtgtggggtgcaggctggtttactgggttcacgattgagggagtggtctgggggttaggtgtagggccaggctgcgttgtgctctaaggggcaggcggcaggcggtttgggggggctgtggtcagacagggtggggtggcggtgggtttggggaagccgcagcagcccgccttggggtcccgcgagtgccgagggagctgccggggcatggtggcgcggggcccgtggtcctgcccggcacgacccccgccccgcagcgccccgcagcgccccgcccccgcggccccgctcgcgacgcgtctcccgcggcgccccgcccccgcccgcagtgcccggatgcgggtgacgcgcggccgccatctttccgtcccgggcagccagcgccagtcggagccagcgcgagccgccgccgccatcactgccgctgccaagtcctccacccgctgcccccgccatgtgagtcggccgcccgccaccctcaccgcgcttccctgcgccggccgccgcccttggcaaccggccgtcgggagtgcccggggtctctcctgcgttccccgcgccccggggccaggcccaagccggtgactgcgcgcgggcggccgaggagccccgcgtcccgggctggccggctcgggcgatggccgcgggaaggagcggacccagtgtcctcctgcccctccccgcccctgtcaccgcggccgcctgtcttttcgggtcgacccggatcgcatctgtgaggtcgccctcagttgacaggcggggaaactgaggccgggggggcctcgctcaaggtcacgcagctcatcggcggcagggctggaccgagaccagggcttacatcgggtggccttcctcccgaaaaggaggactggagggacgaggatggacaggtggatgggcggagccctggctgcggggccgggaggctgcaggccctgggtcttaatccgtccctgctcctcaggtctgctaccgctgccacggccccccctgctgccccggctggggagggtggtccccctgcaccccctccaaacctcaccagtaacaggagactgcagcagacccaggcccaggtggatgaggtgagtgtggggggagtcaaaagcagtaggagggaccctgggggttggcgtataggtgtaggggcccatgttggtttgggagtgatgacagttcacgcctgtgggtttgcggacaaagataccatgccccatccctgtctccctgtcagcacgcacttggaagggcgctgggggtgttaatcagctttgctagcctggggtgtgccagcctgggcaggtgtgctctggtgatggacagagcgcctgaggttccatagagggagggtgttgctatgacatctgagatgtcaccagcatgcccctgatgtgtgctccttgcatgtccccaggtgtgctaggcatgttctgtgtgtccttggcatgttaacctggcagtatcagggtgcatgttccatgtgtggcacggtgggcacatgtttgaggattgccctcactgaggtgggccttggcacacccccctgcctcgtgggcccttctcccaggtggtggacatcatgagggtgaacgtggacaaggtcctggagcgagaccagaagctgtcggagctggacgaccgtgcagatgcactccaggcgggggcctcccagtttgaaacaagcgcagccaagctcaagcgcaaatactggtggaaaaacctcaaggtaagggtggggacaggaaggaggacaggtgggtgaatggggtatcatagtttgtcttactgatcctcgcctctcacccccagatgatgatcatcttgggagtgatttgcgccatcatcctcatcatcatcataggtgagtagggtgagaatggccggggccctttccctggagaggtttccccagtggattctaggttttgaaggtcattaatctagtttttactcttcagccaaaaacacatatagctgctaatggcaattctgattcatctagagccaaaaactttgatgttatttagcctgcattttgcctagttcttggcagtcttgttaacatttggaaataggaaagctggtgtatccattgaggaccctttaggcctaagagcccagtctgagaaccctggaattgaggagtgggagaaaggaaaggaccaggggcttgagacatgaccaggaagccaaccaccccattatttgagagcttgcggtctcagaggctcagaggattagggtctgtggcttcaaggccataccatggagcggaagggacctcagaacctacctgtctagccccttgctttgtagatggaaaaactgagtccaagagagggtgtcagccagctggggagtggggaggattggagcagggccaggcctgacacactgctttcttgttctctctctttctctcccctctccctcttcctcatcttcttcccctctctccacagtttacttcagcacttaaatccccgaggagtctgccctgcctagagaagggcctctcccccaaccctcagccgttcctccacctctcagccatatctttcagcccccactcccctggatccgtgtgtgtgtgtgtccgtgtgtgtgtccccctgtaaatagccagctgttatttatacatatataatattatatatatttggtctgtttgtagttttattactagatgatttttccggttgtccttaacaccccttcctgaggttcccttcacccctctctcttgccttccttccctttccctttcttcctgactagccccaagtcccttcatttgcatctgctatgcaatagtccctctcctttccttcttcttccctcagatttagctgatccttcctcccaccctggccttcctttcctctttcctcctcactctccccgtcatgctccctctgccccgccctcaaaaaaaaaaaaaaaaaaaaaaaaacaacagcacctgtccaggcttccttaggtacatcttctttgtatccattgggaggctctgagactggccccacttggtcctaagaatcccaaggtctttgggagcgtccagcatgttaattagcgtatcattacatactgctatccctttccatttctttttgttccatcactcttctctcaacctgtgtttctttttttactgaggagttagtccccattagttcttgtatcacattttcatttgcacgacattactcgcaggtggtggggagcctgggcttttggggaaccaggctgctctggtccccagcattgcctcctcctagcccctctagtccagtttgcctcccttaccctcattttccaaacctcttgtaccctcctctccctcccccagctggtatgtaagtgtcttgaagttcagtatgttatgatggaccaataattctgccacttcgggtttctccctacattcctgctccccagttttcatgtggggtactcaactgacattcccatggggtttccctcccatctgcctgatccacctcctcctcccaccaggagagttgggggttggccacaattgatctcttgtgagaggggtggctaccagtgtgtgtgtgggggtcatcactgccttggggaggagtggggcagggcagagaatccccccaattcctgcctgaaatctctggcctcacccctgctgggggttggactgaaaaccctcctccccaatttggggggtgttgccccatcactgcccagctcctctgactgccccccctgaatttagggtgggggtactagtcactgccaatgtgtgtatgggacttgctggaaaacggggatgcttgcccctctccaggactattgagcccagagagagctgtcctctcattgggtgaactgattgaggaagggtctattgtctttttaaatggcacaattttaagggtttgagggtacagtcccttaacctgccacgggagggggcccccaaactttcttccccccacacttctggttttctgtgtggagggggagcagggatatctaagctgtggtgtgaaagggtaggagagatgctggaggtgggggtgctgtgttttagaccccccatattatcccagtgtcccctgcccccctcttcccccaccccatgcccccaattctgtggcgcatccagattgtgaaaatgtacaataaatgtgtaatgagtaaccagg

SEQ ID NO: 1612 - DNA, 463 bp, Homo sapiens
gtctaagatcttttttatttttctattttttttttttggttgggggagaataagatcttttcttaaccaatgggaataatattggatcggaaggtataccaggaaggttgagaagatacattggtaatggactggactttgcaagaggccctgaccttgggcagggcaaagtgtgattctcaaagtggccacaggggggcactaggagttggtaatgggaagtgtcatagccagcccgtgtctctaagcccggtgcgccctgtggtctagggttcccagctttcgtttccctttactggggcatgttcctgctgttggactcctttctactcctcgatttaacttctagacgctctgccgtggctcccgtgcagcagtagatgaagtagttggccatttctgtgaagcatgtcttcccctctgtgcctaacccagtgccagcgcccagatggggttagtaaat

SEQ ID NO: 1613 - DNA, 359 bp, Homo sapiens
ccgggactgtcagtgcacaaggaccagggacgcggctgctcctctgagggggaggaagccaagagtatcttctcttagattgggctgagttcccacacccagcacacacattccctgctcactcacctcccacagacagctgggaaatgacacctctggtgacagagccactctccgggcttctgtggggagcgggtggggcactgcagtgggggaggatctcacacccggaggccctgggaagccagggtgggggagggaggaagctggttcctgtttgtcttagagatcaaggccatcagcctccctgcaccttccagggatgtagtaagcacccccaccccagggccaaagggcct

SEQ ID NO: 1614 - DNA, 16146 bp, Homo sapiens
gtgtggcgtcacttccggcttccttcagtccgctggtcccgagcacgagctgtgaggggattcacttgtgtgcggaactcctcggaaccatggtgagcctgactcccctgcctattgccctacccctgctccgccgtgctcttgccaccccactgcttcctctgtcctgctagggacgtaggctccgtttttgtctccccggccctccgcacatggtgcgagccatgcgcggggcgtgcggcctgcgccaggccagccggtggagctcaccacgagggggaggggtggaccgcaaagccagcgtctccttgtgcctaggtctttgcatagtcccggcagcccaggtccgcgcctcacccggagcgaagaaatttctagtgtgggacccgctccgccctccttctaggggcggagcctggagcgacggggtctgagccatcagagggtggaggggccgcagccttccgagggtggaagatggaggccgcgttccctcgcccgcccggcaggcgtcaccttgatggcctgcaacccctccctgcctcattcttagttcaagatcgtctttagtctcgctgtacgtaactgtcaatctcgctggtgtataatttatactcccgggggccttgtaaatccgaaaagccatgtcgctctcctacaagtccctctctcccacttaaatgctttctccgatgatggaagcttcatttgattgaaaacattgttgtaaatgagttttctcttagatgtccacttgtaagactagtggaaggcacctcagtgtatgtgttagagtattggtacttaaacggaatgcctcttggttttccttttcaggcgtccctttcccttgcacctgttaacatctttaaggcaggagctgatgaagagagagcagagacagctcgtctggtaagccttgttctaagcattgttttaaagataaaactggaggccaggcgcggtggcttactcctgtaatcccagtactttgggaggccgaggtaggcggatgaactgaggtcaggagttcgagaccagcctggccaacatggtaaaaccccgtttctactagaaatacaaaaattagccgggcgtggtgatgggcacctgtaatcccagctactcgggaggctgaggcaggaggatcgcttgaacccaggaggcggaggttgcagtgagctgagatcgcgccattgcactccagcctgggcgacagagcgacactctgcctcaaaaaaaaaaaaaagtaaataaagataaaactgtacttgaagactgtaaagttgattctgataatctccttggtttttactccagacttcttttattggtgccatcgccattggagacttggtaaagagcaccttgggacccaaaggcatggtaagaaaaatagaaaagttttatattttaatattgttttagagcgcttggtggaaatataataacaagcgtattaaaatgctttttaatctttaaaacgtttaattataaaagacaagtatgttctccttagtaaaaatcagagtccccagaatcaccatccccaatcccatgcccctccccaatgacaagtactgttatcatttgcacgtacatcttctaatattctgtttatgtagaagtatgtgtacttcattatgtattttatactcatgtaacatactgttttataaaacagatactatttatcaatacttttttgtagcttgctcttttaaattcctttcagtgtaagtagataacactgcccctttaactgtcaaatattatcctgtaccttaattattttataatttaattatggctgtattgatagtttctttccattgtttttgcagttacggtgttgaaacaaaaactagtgtctacctgtgcttctagtgtttctaggggtagatacatggtttggttacgtggtgtatgtattgaaaacatttgatgaatggataccacaaaatagctatccagagtgtttatacactagcactgtgtgagaatactgattgatccatgcattcttcaagatgtgcttatgtcttaacttgaaccaattatgttccctttaggacaaaattcttctaagcagtggacgagatgcctctcttatggtaaccaatgatggtgccactattctaaaaaacattggtgttgacaatccagcagctaaagttttagttggtaagtctgaatatactttttcaccaacctaataatactgtttgttaacatttttgaaataactttataaataggctgtgttgaccaatcgtactgtcaattgatgtccactagttgttaattatcgttgttaaaatacaagcttcaggagtgcccgtatgttggtggtaaaactgttgcatttcagacctcagagttccaaataatttgttgaatgaggaaccctggtaagtttagattggtagtgaatatttttggagaatttagtaagcaaagaagcaattttgagttaataactaatttctttttctagatatgtcaagggttcaagatgatgaagttggtgatggcactacctctgttaccgttttagcagcagaattattaagggtaagagcaactaagcaactcttttttcctactgtgtttttgagtatcagaggtaatctagtccttacttcctctgtctttactattgaggagtgcttaataattttctatttataacttttgttttataactttattaataggaagcagaatctttaattgcaaaaaagattcatccacagaccatcatagcgggttggagagaagccacgaaggctgcaagagaggcgctgttgagttctgcagttgatcatgggtttgtatagcaaagtactactgttctaaacatttagtgttctttcataacatgcttaatgcaagaaatctataggacactgaaaagcatacacaaagatcatcttgctgcctcaccccactccaacagtcaaacctacatcagcctccagagatagccactaaagttaagtttgggtttttagtctttttgtatatatcatcaaaatatacaaataaagcaaatagtataatactgtatagagaatttgttagcctctttttaacctagttaaatattaagcacatttttggatgtcaattttctgtgcagtattttaatagagttacacatttgaatatttggctagaatgactgtattaacctatctgtagggggagatttgtgtatttgatgatttttagcattataaaataactttgtgacgttgcgacatagcccaaaggtttctagaagtgtaattgttgggtccaaaggtaagtgtgtgtgttttaaggcacccccaaacctgggctgcacagcaggtgagcagcaggtggaaaaattgtcttcccatgaaaccagtccctggtgccaaaaaggtccgggaccactgttttaaggcacttctatttatttgcccattcacaactgtataataatacttgtttttcacgtccttttatttatttatttattttgagacggagtctcgctcttagagttgcccagaatggagtgcagtggcacgacttcggctgactgcaacctctgcctcccgggttcaagcgattctcttgcctcagcctcccaagtagcagggactacaggcatgtgccatcatagccagctaattttgtatttttagtgtagatggggtttcaccatgttgctcaggctggtcttgaactgacctcaagtgatccatcctcctcagtctcccaaagtgctaggattacaggcgtgagccactgtgcccggccatttctcacattcttgccaacattagacttttgcatgcttgtgtggcccccacccctcttttttttttggcattttgccagtttggtggggaaaataacatctttaatttgtgtttcttgattactgctgaggtttaattcttttcatatagcttacagacttgatcagttagggtaaaattatctattgacatgaatatctagataaattttgaaaagtaaagtagggttaatatgtatatttggttggttttatttagttccgatgaagttaaattccgtcaagatttaatgaatattgcgggcacaacattatcctcaaaacttcttactcatcacaaagaccactttacaaagttagctgtagaagcagttctcagactgaaaggctctggcaacctggaggcaattcatattatcaagaagctaggaggaagtttggcagattcctatttagatgaaggtatgtatgaatgtcagatacaagaagctttgattagatgctgagggctgaatactgagtgaattctgttttgagaccagtgaccctttacaaagccagtgaacttgaatttaaggacatatcatatgtgcaaccatttttgtcattttattgacagtgtactcctcttcccgcgctattccagcattgttgatgatctctagagtttacttaactaccatgaagttatttgcagtctctgataaagaggaaatgttttcttttactagaaatcatctattctcaaatggtacttttaccaggattatatgtattctccaggaagggtctgggtcagtcaaatcattgtgttagctggttgttgaggatgtacagttgaccattgaacaacatgggtttgaattatgtaggttcacaatgcaggttttttcaataaatatagtcagccctttgtgtccgtggtttgcacatgtgcaaccgaacgtggatggaaaatgcagtatttgcaggatttgaaacccatgtatatagtgggccagcttttcaaatctgctggttccagtcagcctggaacttaagtatgtggggattttggtgtatgtgggcgtcttggaaccagtccccttcgtatactgggggatgactagttttttttagaaaagaattaaaaaaaatttctttaacaaataattatgtatgtttatagggcaagaggatctagttcttaaagagtgataaatgagacataataagtactgctttcttagtagtacatttttgtttagagtgaagttttccagatcatcttcacattatatttacttcacaaaatggcctgtcaaaaagtataggcattcttatatagagaaggaaaaaaaaagaattagatggtgctttacaacttctgtttttaccagtggtttggagtcctggttttgttctgtgtcataggtcttgatttattttaagagagagtcataattctgaaaatactcttgattaagtttatatacaagagctgtgtagcatttctttttttttttttttgagacggagtctggctgtgtcacccaggctggagtgcagcagtatgatctcgcctcactgcaaccactgcctcctgagttaaggcgattctcctgcctcagcctcctgagtaggtgggattacaggcgtgtgccaccatgcctggctaacttttttgtatttttagtagagacggggtatcgccatgttgaccaggctggtctcgaactcctgacctaaggggatccacctgcctcagcctcccaaagtactgggattacaggcgtgagccaccatgcctggccgctgcgtagcatttctgataggggctggtggtagggaaggagcattaaaacaagaatattagtagcacaagcagcaccattcttgaatgtctgctctgtactaggaattgtaataggaactttagtcatttagtcatcatgacctggtgagtgaggattaggttcacttgaatagagtagaaaacccaagataatggtggcttcataatggaaaagtttctaatgtaaccaaaaaaaggcctagaaaggtaggtggtactgggtttgtatgatggttccaaagcagcaggactaggctggtaactagcacctctgctactggttacattcctgttttacaaattagcatttctggttggataatttgtcgaaggttatatagccagcagcaggggcatgatcagggtcagatttatctgactccacggtgtccatggtttttccatttttaccaccagcctcaatacctgaatcttcaatttttctcttgtggtggtgattttaagctaataaaaatataggacttaacctattgtctttatattgcaacccatacagatgtgggtgtagcgtatatctgaaacaaaagtttcaaaatactgtttaattttattgtctgtactgtgctcttatattttctgtttcatattttttaagtaacccattaaattgattttgtaataactcttctagtgggatgctttataccagaagtgtccaaggaagagaatacagtcatgggttcctagtttctgtttctggttgggtcggtaaagccccttcctcctccctcttttctgcttatcactagagacagaaactaaaatccatggctttcaggcgctaaaagcctaaaagcaaaacaacaacagaataaggcaggttggacaagcttgcttttatgccttctaagagcttggtaaattggacttaaatagcttctttgaaacagtgatatgataaagcagacagctttttataagatttactaaggctgctttgaagtattaaatatgatactgttcttatatttattgtaggcttcctgttggataaaaaaattggagtaaatcaaccaaaacgaattgaaaatgctaaaattcttattgcaaatactggtatggatacagacaaaataaaggtatgtaactctactttttaaaaattaaaattactgcccaggcagagtggctcatgcctgtaatcctagcaatttgggaggccaaggtggtggatcatctgagatcagaagtttgagaccagcctgaccaacatggagaaaccctgtctctactaaaaaaaaaaaaatacaaaattagctgggcatggtggcgcatgcctgtaatcccagctattcgggaggctgaggcaggagaatcacttgaacccaggaggcggaggttgcactgagccgagattgtgctactgcactcgagcctgggcaacaagagtgaaactccgtctcaaaagtctcaaaaaaaaaaaaattgctggattctataaactcaggaatcaattgcactaaaaagcttggaataggtatgaatctattgtgtatatacacatatatatacgttggtaaaaatgttgaaatatgctatgggactctttaaaaagagtaatgaggcctggcgtggtggttcacgcctgtaatcccagtactttgggaggccaggcgggcggatcacaaggtcaggagttcaaggccagactgaccaatgtgagatggtgaaaccctgtctttactaaaaatacaaaaattagctgggtgtggtggcgcacacctgtaatcccagctgcttggaaggctgaggcaggagaatcacttgaacccagcgggtggaggttgcagtgagccgagattgccccactgcactccagcctgggcaacagagcgagactcaatctcaaaaaaaataatgaaactgatgctctctttatgcttcgtttgtcttagatatttggttcccgggtaagagttgactctacagcaaaggttgcagaaatagaacatgcggaaaaggaaaaaatgaaggagaaagttgaacgtattcttaagcatggaataaattgctttattaacaggtctgtgtttgcttttaagaaaggatttttttccatgaaagtttatggaatacttcatatttacttatattgaattagattttttacctaggaactgtcttagataacttcacttaaattatggatttttgtaatcagtaaattgtgatttatgcacacttacagtgaccagaattacgggattgatttatacagttactataataaagaacacttcttttcatactagtaatggatgcattagtactatagttgataaactctaattatataggtaagaaatgcaatcttgttctaatttgcatttcttttacttgtggtaaaaatgtttacatgttttttagtctaatgtagtttatcttgtaacagttgtgagcataatgttttcatgtaaaatatttacaggcaattaatttataattatcctgaacagctctttggtgctgctggtgtcatggctattgagcatgcagattttgcaggtgtggaacgcctagctcttgtcacaggtatggaaaaaaggtattgttttctaacaaacacaatagtcactcttgaatttgttatttgttactatatgcaactacctttaaggagtttagaatttcagcagttattctgaaatctattctcttggatacctttaatttagatacatagatacattacatttacgataccaagttatataccacatttgccgtaggtatagatttctttcattgtgtcactgttttaaaggtagatttttggccaggtgcagtggcttgtgcctgtaatcccagcactttgggaggccgaggcagccagatcgcttgagctcaggagtttcagaccaactttggcaacattgcgaacccacatccctacaaaaaaaaaaaattggccaggtgtggtggcaagcgcctgtgatcctagccacttggggggaggctgagggaagagaatcgcttgagcctgggaggcagaggttgcagtcagcggagatcgtgccactgcgctccagccttggcgacacagtgagaccctgtctcaaaaaaaaaaaaagatatgtatatttttttctcacaaacctgtaagaccgttgttaaaatctgaacaaactagagctttaaaaagtcttaagtctacttacatttatctagttcgtacatttgtttttattgcttagtaagtagttgaatgctttgtgtcctttgtagtagtacagttacaatagtaacctttattgaacatttactgtgtgctggagagtgggtcaagtactgaaacattgcttttgttaattttaaaaaatttctgaaagtaataaacgttagcatacgtgaaacaatcaacattgtataatgaaaattagtatacctcaataccctttaatagaagtatgagtgatataattccagttgtgtcaaatagaaattgtgtttataaatcagacatgtctgtctacatcacaatgacatgagttcaggctggttgcggtggctcatgcttgtaatcccagtgctttgagaggccaaggcaggaagattgcttgaagccaggagttcaagaccagcctgggcaatatagtaagactgtctctacaaaaaattagctgggcgtggtggcacatgcctgtagtcctagctacttgggaggttgaggcaggagatctcttcagcccaggagtccaaggctacagtgagctgtgatcacgtcactgcagtccatcctaagtgacagagcaagaccctgtctttaaaaaaaaaaaaaaaaatgcagcttgtttgctttttattgtggtaatggtttaaaaattattgtttattaaatttttacagatttagggatataagtatagttttgttaatggttttcatagtacactctaagccctggaaaataagtttaacacttttctagattttaggtccttgaaaatgaatgaataggttggaaagttggtttgggaatgagaattaaggagacctgggttatgagttgtgaagtcagtagggctgtcacactgtttggaactgccatgaatattagaagaaattatagtgtactaacctttggagagtggacttggtctcatcccagaatgatctcttaagacgttttttttaatcatttgagaagcatagtcgtcttctaaccaagagacattttcctttaattacttgaagtgggtttacttgctttaaagttacttaggagccattgcgtacttgatgctttaaggtgacaaataaacacaatttaagatgctcatgtttatgtaattcattctttagttccacaaaataaagatgtaagaggccgggtgtggtggctcacgcctttaatcccagcactttaggaaggcctaagtgggcagatcacaaggtctggagtttgagaccagcctggtcaatatggtgaaaccctgtctctactaaaaataaaaaaattagccaggcgtggtggtgggtgcctgtagtcgcagctactcgggaggctgaggcaggagaatcacttgaacccgggaggtggaggttgcagtgagctgagattggcgccactgcactccagcctgggtgacagagcgagactccgtctcaaaaaaaaaaaaaaaaaaagatgtaagaagtaaatggtaataatatattgatgggataaacatatcgtaaggtcttgacatgaaattgctctatacccagaagaatgtttattaagtacaccaactgtatgtctatgaaggtgaccacatggtggctcccatccttaaaagctcagtggttgtcaaaggtgtatgatgacattggttcttgcaagtgtcattaaataaatgtcttgcactgggcatggtggcatgtgccagcagtttgatctattcaagaggctgaggcagaaagattgcttgtgcccaggaggttgtgctatgatggtgcctggtgaatagtcattgcgctccagtctaggcaaggtagcaagacactctctctttaaaaagaaagaaaagtctcatgtagaaggatgaagtgaaaagtttcataagccaagttagtcttatttttggatatgacgtcccaaatatctgttgtgtctcacatctagaacacaaagcagtctcagaattttgccagccaaaagtaaaaagaactttatacaaattatgagtataaattagtagtttcaaagaccagagtctttatgaatttattataaaataaataatagagcattgacagatttatcagtaaggcataggaaaagaagggttgattgataatatatgcaattcacattatgaaaggagtagtcagctagagaaaaggattttgaaatggaaacctgacttttgcttagttaggaaatagggaacgaagtggctgacctgttcagtttacagcatggaagatggagggaaaataggaatagaaatgagacataaggactaaattaatttgttcttattaaatttggtctgggaaattcttagtatgcatttcttgtttttttaggccttaggacatttcatttgtgataattagagatatcaggtgcttattaagcagttcatgaagtgtatagtggttgacttataggacaaatattttcatgtcttgtgctgggaattgtatcatgaggtcttagtcttataggttggattcagaagagaatctgaatttaaactcaaaagtaactgctttaagactcagtttaaccttgggaaggtagtattgtatagtgtgtgcttataggtctgaagccagactgcttgagtttgaaccccagctttttatattcatcctagttaggtctttggataggaaggtaaacctcttggcctcatttttatcatgtgtaaaatgggataataatggagcctatccaagaggattattttaaagattaaataattagtcgatatgaagtatttaaaaagagtgccaggaatataatcagcaatcaatttttaaaatgtgaaacacattacctatcattatctatccattactgcttattagaaaacaggaattttaagcctgctgtgcatttaactaatacatgtttatgtttataggtggtgaaattgcctctacctttgatcacccagaactggtgaagcttggaagttgcaaacttatcgaggaagtcatgattggagaagacaaactcattcacttttctggggttgcccttggtgagtgattatgtagatcctggttagggtgtctaaattcttgctaggctctgttgaagtaaaggttattgtagttactagaatagcatatcttacaagtcttaactcttcagaagcatgatacatactttgtttcagtctcttgagtcaacctcatatttaccgtgtctttgtgaacagtgcatgttcaacagttttttttccttgataacttagaaccattatgagccttgattgttggagaatgtataatacaggaagacaggtcagctttcagaacccagtaatataaccaacaccggcataaataatagaaggcaaactttttatccctaagtggtcactgtgtcttttaattttaggtgaggcttgtaccattgttttgcgtggtgccactcaacaaattttagatgaagcagaaagatcattgcatgatgctctttgtgttcttgcgcaaactgtaaaggactctagaacagtttatggaggaggtaagcatttagaaaatgttgaatatatttttaatttcttaaagtacaatataagtcataagtggttttaatggttcttacagaaatcttatattgcttttgcactaaattttaaaatgcttggcatatcttaaagtcagtaattcagtatcttggagacaactaagcattgcaatattttattggaattttaatctttaggctgttctgagatgttgatggctcatgctgtgacacagcttgccaatagaacaccaggcaaagaagctgttgcaatggagtcttatgctaaagcactgagaatggtaagttaatcaaaatgagagatccgaacttaagttttgtggttattgatagttttaaaatgagtagaaaatgaactggttaatactgcttttaaatttgattctggagtttctcctcttcgtgagcagtaactgaagcagattttacattgttcctaaatgtataattttaaaaagctatcctagttaggagtaaatcagtggttcttacagtagagtgagtagttacttgttttcttcattttcatagttgccaaccatcatagctgacaatgcaggctatgacagtgcagacctggtggcacagctcagggctgctcacagtgaaggcaataccactgctggattgggtaagcaatcaaggggaactttgtggccgttgttaaaagtaactcttttcactaagctttttttttcttttggaacataaagagttacaataaccgtataaaagactcttttggactttgtcctcataatcattacatgtgctgggaaaatgtgtgtgactttatatgctcagcatttcccaaactttgttattccataagacatgtaaaactggttagaagatttgtaactatttggtatataacgactataggatttaaatataaacaatacttacattctgaaaaataacataaactattatgttgtttatacaatcagtattaacttctaatttcatagtaaacttactgcaagataatcttgagtacagatcacagatctctagtccatagataaaagtggccaatgaggcagatttaattcatattgaaaaactttctgacaagctgtgctggacattatagagtagtcttaagaaggtagataatcctgtcattgaacaagagggagcaccagttaatctgtgagaaaatgaagcaggattctcacaagaagagaagttgggtaggtaacttatgaattttcttccatttgttttttattatttgatatgttgtcttctattaatatgggtgatcagtagttgacattattgttgttattactattattataactgacacaatggtcttgctctgttccccaggctggagtgcagtggcaccatgataattcactgcagccttgaacccctggctcaagcagttctccttcctcagccttccaagtagttagggctaaaggcatgtgccacaatgcctgactaaattatttttattttcttagagatgggggggcagtctcactatgttgttcaggctggcctcaagcaatcctcctgcctcagcctcccaaagtgctaggattataggtgtgagccactgatcctggccccttttattttatttatttattttttgagatagagtttcactgttgttactcaggctggagtgcagaggcatgatctcagctcactgccacctctgcctcctgggttcaagtgattatcctgcctcagcctcctgagtagctgggattacaggtgcccaccaccatgcccggctaattttttatatttttagtagacggggtttcaccatgtttgccaggctggtctccaactcctgaccttaggtgatctacctgcctcagcctcccaaagtgctgggagtacagatgtgagccgctgcacccggccccttttaatttttttaaaggctttctttgagctcatttgtaggcttatctacctactgagtaaagtagttgggtgtcctaattttattaataggattaatttttattataaatcattagagatgttttgatactttagttaaaactgctttttagtaaatttgtttttctttgcagatatgagggaaggcaccattggagatatggctatcctgggtataacagaaagttttcaagtgaagcgacaggttcttctgagtgcagctgaagcagcagaggtgattctgcgtgtggacaacatcatcaaagcggcacccaggtaccctaacacttttctcagaaaaaattactaacagcaaaacaaaatagggagctgtatttattttataattagagttaatgaaaagcagagacagttttgcctggataaaagtatgtaagttatttaaaatatcacaactcttaacacttaagccagaaaaacttaaggggaaagagggatgggcagctgaggtagctcttaggattgaaaaggcacagaaagagccatgcttggaaaggtcaagtactgaggacagtagatgctgtgatgctttctattgtctttaaacagaatgatagcaaaaggaaactgagttctgtaactaaagtgttctagggcaaggtcatatagccacacctactcccagaaatcttcacaagaagtcagtgccctcacccacagttgaaataacgcttaaaaaatgtataataccttgtttggtctgatactgttttagagatcaggtatcttttattagcaaattctgagtaatttgcaataaagaaactgaattttaactcagccttccagacctaccagaccatgggcttctttttcatattccttattaatctccagaagactttttttttcagatcagtgccctgtgacagctgcttcataactcttgacaatggttagcatcctagtccccccataagctaccaagggtgaaaagtttatctctctatatgatccctgtataatgctgtactctttgatctgttcttaagcttcttcagcttctcgtaactgttgtgtttgcctctaaaagcagtgtttctcaagctttagatccttgaacaagcattaagtacaaatttactagtacccttatcccatctttccaaaagattgttctatgcccccttattgtatggtcatcaaagaataaaagatgagaatagaaggtgcttcttgttggtgggggtgtctgcagagtcccaaggcagaacagtcctgatgtggtgcagggcatcacacagaggagggggctgagtggctagctcaggtctgtcttcctcctcacctaaagccagcagtcccatcctatataacccattagtccatgacataacttggtcacctcttaaaagcccaacttccaatactgccacattggggattcagtttcaatgtgagtgttataggggacacacatgcaaaccattgcagagttataacagttttaatacaggattctagttgtgtttgtatttagtataatactttggataaaatcatgctcttcatttttcactattgacttttttcttactctcataggaaacgtgtccctgatcaccacccctgttaagcattcccacgtgctgtcgatctttggaccagtttctagcaaagttgtgtttgaaagatactctattaaagaagactgtggaatctgtttatcggtgcccattatatccttaagtttggatatttagctgaccttcgctttaacataggtctaatttatttgccgtgtcattttccatacaaatcagttgatttaaaaaagttcatttctcatactgtgcattaaaataaaaatttgaacaattacttggttct

SEQ ID NO: 1615 - DNA, 100 bp, Homo sapiens
ggtggatcacttgaggtcaggagttcaagaccagcctgggcaacatggtgaaaccccatctctactaaaaatacaaaaattagctgggcatagtggtggg

SEQ ID NO: 1616 - DNA, 11597 bp, Homo sapiens
cggtcacgtaactagtgagttgtgcagctagggttagaataaacagatttattttttttttttcttagaaacagcaattaacaatgtgactcctaatcaaaagaaaagagatgtccttggggcttaaagtactatggtgggagtcttggactgagtaggtttgaaaatacaattttatgatcgtggagtactaggatttagtcattttgatgcagagcatttcctgatcaactgctgttgtggagtgtactgtccaatagaattctctacaattaaggaaatgttctgtatctcaagagattgttcttaatggtggccagtagtcatgtgaccgttgagcatttgaaatgtggctagtgctactgaagaatggaattgtaaattgcttttaatctaaattttgcctgtgatattattggctgtgggtttgccaaaatttgtttttttaaagaggaaaagataacggactgttggctgctttattggacagcacagctagcatatagatgcagataggtagtataacttgtttgtagtttaatataaatgttgtattttgtaattaggccaaatttgagtttcatcatggtgactatgaaaaacagtttctgcatgtactgagccgcaaggacaagactggaatcgttgtcaacaatcctaaccagtcagtgtttctcttcattgacagacagcacttgcaggtaagcagcttttttgaaaaccacttacaggctcattcaaaaacttattggttagtaaacgttttatatacaagttacttaattgttgtgtcccccaaacactgcattatttttgaagttatttaaaaagcaaaaaataggctgggcatggtggctcatgcctgtaatcccagcactttggaaagccgaggcgggcatattgcttgagctcaggaattccagaccagcctgggcaacatgacgaaaccccatctctacagaaaatataaaaactagccaggcatggtggcgtgtgcctgtagtcccagctactggggaggctgaagggggaggattgcttgagcttaggaggctacagtgagatcttgtcactgcactccagcttgaatgacagaacgagaccctgtctcaaaaaataaaatgaatttttaaaaaagtatttcccaggcctcactgtagaacaatggttcccaaattttgctgcatgttacagcaacctggcaagccttttttttttttttaaacgggaaaaaacccacctccttcgaagcttttaaaagtcatgattctagtgaacagtagtgagaactattgccctaaagcgtgtctaccagatgtgtgggcaatggatgaacatcacttgagaacttgttaaaaatatagactctcaggctctactaatcagagtctgcactttaaacagaaccctcaggtgatttgaaacacactttgtttccagaagcactgacctggacgtttttttttttcttgagagggagtctctgtcgcccaggctggagtgccgtggcgcaatctcagttcgctgcaagctccaccttccgggttcacgccattctcctgcctcagcctcccgagtagctgggactacaggtgcccgccaccacgcccagctaatttttttttttttttgtattttagtagagacagggtttcaccatgttagccaggatggtctcaatctcctgacctcatgatctgcctgccttggcctaccaaagtgctgggattacaggcgtgagccaccgcaaccggctgactttttaaatctaaaaggatgagggacatatatttaaaagatccacatttatttcaaataagcacttccatttgggcacagtgtctcacacttgtaatcctagcattttgggaagccgatgggggaggattgcttgagtccaagaccagcctgggcaacagagtgagacgacatctctacaaaaaatcaaagaaattagccggacattgtggcgtgttcctgtggtcctagctactctggaggctgaggcaggggagaatcacttgagcccaggagtttagagttgcagtgagccatggcaccaacacactcctgcctgagtaatgcagcgagaccccatctcaaaaaaaaaaaaaacaccgccaacaacaaataaccacttcccagttaagcagcaatccaagtattgcaatttagtttttagatgcagccacttgctggctgtatgatcttggacaggtaactgctgtgagcatgttgcttctgtgaaattgaacaaatgataatcctaaggttgttaaatttaacgtaaggttgttacatttaaaattaactaatacaagtaaagtatattacatatgtataggtttatttacatttgtaggctacttcagacatcttcaaagtcagagtccttattttgccttttagaggtgctagatagtgaagaaaagatgaactttgtaattaagttggatgttcaaatggtaactactttttaaaaataagggttttgatttaactggtaatactttggcttttttctagtcccttaccccaggatatgcttaaatcttttatttattttttgagacaaggtctcaactctgtcaccacgctggagtacactggcatatggatcatggctcaccgcagccttgacctcctgggcgcaggttatccacctcagcttcccgagtggctggactacaggcgtgtgccaccacatccagctaatttttatattttttgtagagatgggttttcgtcatgttgcccagaatggtcttgaactcttgggctcaagcaatcctcctgactcagcctcccaaagtgctgggattacaggtctgagccaccacacccagccttaaatttttacctattccttcatcctctcactagcttctattcttaccacatctgctttatcttcctctatataaaaatgacttcaaacttctcaaaatctgtccccatgaaatgcctttagctttaatttcttctagcaagtagtctctggtttacttccctaactttttatcttctaattctgcataaatttttcctttatcttatatggcaagattttgtctgtctagaatatggatagggactacaatttgtcccttactctgtatgttaagatgtttaataaattgtgggaaatggacttcatgtgacagttacgctaaagtcttatttttaaaaaatattaaaatgttttccccttccagactccaaaaaacaaagctacaatcttcaagttatgcagcatctgcctctacctgccacaggaacagctcacccactgggcagttggcaccatagaggatcacctccgtccttatatgccagagtagagtactgaccagcaaaatggagaagatcagagaatgcagcagcagttttttttcttgttttcttaccactttattctttcagagtttaaagaaaatggactcatgcacagaacactatgcattttgaaacttgttcatcctggatttttttaaatcatttttatctcagaacttaaacaaaaattagatgtcgtgcacggactgtgtgaaagaagatgctttgcatatttgctgcactgcatcagtatcttactaaaaatgtgaaatgaaaggactattgtacactgaaatgcttaaatgtatctgaaagcacaaggtgatactcatttttatggtcttcccatttgtgctggtttttgcctctttgacatctgtcatcagtatttagagggtgagaagtgaatgtaacaggtataaataacatttttaaaaacaataactttgctataatcacagttgttccagagcactgtcagatacattctaatgaccagaactggtttaaaaaaagaaaatacaaccatgggaaagaaatcttaaatgaaaaacgcatctcattgtaggcatttttgcctcatattttactgggccatgtttgtttcctggtactcatgtattttttttttccagatctctttccccaagttgctattgtaagagtattctgctgcgtgtggatgcagttatacacattaaagcagatctggagtctgaagtagctataaagcagctataaaacagaaatacatgcatagctgcagaaaccatgataggtagaggacttttcttttggttttgttttgttttgttttgttttgtttttggttttacagagaagagatttttattacaaagaaaaaaattccagtgaattgtgcagaaatgctggtttttacaccatcctaaagaaaaactttacaagggtgttttggagtagaaaaaaggttataaagttggaatcttaaattgtaaaattaaccattgagtgtcaaagttctaaaagcagaactcattttgtgcaatgaacataaggaaagactactgtataggtttttttttttttctccttttaaatgaagaaaagctttgcttaagggttgcatacttttattggagtaaatctgaatgatcctactcctttggagtaaaactagtgcttaccagtttccaattgtatttagcttctggttggaatttgaaaaaaaaagaaaaaaagaaaaagaaaacctaaataaaataggtgaaagttccctgactattcaggtgaatacacaaagtttgaagtgttaactttttctttccatttcactgatgttactggtcaccttagagaattatttcatagtctgtggctaaatagtaaattcagaagaaaaatacctggcaattgagtgtgtaacttcaacaagaacaggaatcaagaacatactgtcagctttcaacagttagcaacctggccttatgccttgcttcatgggaaagggccattcttaaatttcaaaatgctttcatgtgtcctcttatttaaaaattagaatctatttgaaataacattttgaatgtttattataaccaggtactcttctaagctcttgtcttaacctctcaacctttggtggaaatagatgcagaggttaagtaacttgctcaagctcagatcataagtagtggaggatttaaaaccaggctggctggctcttaaggcctatgctcttaatttaccatgttgaattaatttaccatattgaattacacttatgttcaccaagttaggcattttggcagccattgtttacgtttttattttggaataatttagaaaagttaccagagtaatatgaaagctgttgtgtaatctttaccctcatttttattattttgccacatttttttcattttctctgtacacttatacctgtgagctatttgagtttgttgcacactttgtgcttccttaccccttccttagtacttcggcatatgttccaagtacaagaatatttcatataactagagtaaaattaccaaactcagggaatgttgatactctttatcatccatattcgttttgttgtcccagtatccttggtagcttgttttagatccccccctctagagtacaggatcattgaatttagttgttctcagttgtctttaatgtggaacagttccttagcctttatgtgttccatgacctctatgttttttggagtacagggcaatttttcttgtaaattgttactcattttgcatttgaattgtttattcatgcttaacgcccttctcaagtatactctccatctgctcttcattgatgttacttttgagcgcctggtcaaggtgtcctggttttgccctatgtgtggtacttactactagcaatctctgggaagcaatgtgcaaataccctgttcctttatcaggagctcccttggcgattctttccagactaaaacccaaaccagtctttaactatgatggttacaaaatagtgattttccaaatctaatgctttgtccatttacagcatttgttgtaagagagtgttctatctctgccatttattatctacctaaacactatggcctcatattttttccctccaaatcataatttgcatgcctttattattttgagcatctcctttcatgcataagatactgtaacctttctgtcccagcctcaagccctggagtcagctgtttctccaaggagcccagcttccttttagtgggaaatactagaagtaaacatctgggactcctgtatgctcactgctgctattgctactgtggagtcttctgccctttcacagtggacagatcagcaggcgatctaatgtagggaaaggatttgtctttaactgttaacttgacttaaatttacttaaagctgcatcctttttagtctttagtcatgaaatgttcattaagattccctgacagaaatcaagtaagagtcagctgggtgcagtggttcacacctgtaagtccagtacttggggggccaaggcaggaggattgcttgagcctaggagtttgagacgaggctgggcaacagtgagaccttgtttctacaaaaataaaattaggcgtggtggcacacgcctgtagttccagctactcaggagactgaggtggaagaatgtcttgagcctgggattttgaggctatgggaagctgtgattgtatcactccagcctgagtgacagaagctgtctcagagtgccacagtcaactgaacttggagacttctgagaagtgaacttggtcttttcaatactatagacttggaggtttgagatctgcatggttttattctcggtacaagaaaaggggctagtagcatgctttttttcttccccctctattggaccatttcctgtaacactaacatgcttagcctcaaacttttcttgaggtcttttttaggcatatggctcaatctattttatttttcaatatgggctgtagttcatatattttgaagtttcataatcttaaaaaaaggaaatgcaagtgtagcttggcattttagatctgggaaggacctaagattcgctaaggattggccattgctgtggtctccatgtgtttcccctaaatttgtatgttaaaatcccaacccccaaggtgatattagcaggtgggggtctttgggaagttattagatcacgagggcagaaccctcaagattggagtaagtgcccttacaaaagagaacccaggctgggcacattggctcacacctgtaatcccagcactttggggggccaaggcaggcggatcacctgaggtcacgagttcgagaccagcctggccaacatggtgaaccctgtttctacaaaaaactacaaaaattagctaggtgtgatggcacatgcctatagtcccagctacttgggaggctgaggcaggagaatcacttgaacccagggggcagagattgcagtgagccgagatcgtgctgctgtactccagcctgggcaacagagcgagactccatttcaaaaacgagaacccagagggctcacttgccccttccaccacacagtgagaaggcaccatctatgagccaggaagcgggccctcacctaacaggatctgctgggccttgacccaggactttccagcttctagaaccatgaaaaatttctgttgttcctagcagcccaaacagaattagaaccattaatttctatttctcctttagcttaacactggactttagttttaatcttaactgagagtggtcctgctagtttctttgctttacctgtttttaaaacactttgagctaagaatttttcacccaattatcacacatgattagaaaacaagatgcttaaagtgaaaaaagacacccccacctttaccctacttgatatccaggtccttttcctccaagaatatttctagctgcttctggttttgctagtttatttcaaaaattacaattgtttgagtcaaatctatacttgatattcattgttgggtttctttaggtcattctgctgttctctcagtttcccaggtgttttgtgtgtcttccttgtgctattaattttcctgtggccttgttggtcagatccacagaggtaaatgcaagtgtttttccttgcttcagaacatgtgctgtaatcactatatcttctcctaattttgcaggtgacatgtaccttgaaagaaaatgaatatagttaacagcagataatttttcaaagggaaagttgtgtgcatctcacaacagtgttcctatgtaacttattttactcctaaaaatagttttaacggtagtattggtaagctttctgtactatcaaatgtgaatggctggtcctaaccaggttctattttacccattccttacccacacaagtttcttttcccaaatatgtgagaagaggttttcttgcctccccttttttccctttacatttcccacttcacatttatttggggctggtgaaagatttcctccagctttcatttaatctccttaacttcttagatgaaatatcacttggtgtctgtatattgtcctatccatatttacaatttatttgactctaaaatgacaatataacaactataaggaattgatatgatgtccttacaatcttgatgatggactgtctatatttttaagagatgtacatcctagtcacttgtaatcataagttgtctttaactcagctggctccagctaattaaaaaaaaaattggggagatgaggattgtttaaaacaaatgttaatgttttaaagggaaataatttccttacagtttatttttatgtttctgctttttagaaagaaacctttaaaaaggatatgtatttttgccatattcaaaataagacttcagtatttatggctaggaggtataagaaaggtggatctggccgggcacgatggctcaagcctgtaatcccagcactttgggaggccgaggtgggcagatcacctgagggcaggagttcgagaccagcccggccaacgtggtgaaaccccgtctcaactaaaaatacagaagttagctaggcatggtggtgggcacctgtaatctcagctacttttgaggctgaggcagaagaatggcaggaacccaggaggcagaggttgcagtgagccgagatcgcgccactggactccagcctgggcaacagagcaagattccatctcacaaaaaaaaaaaaaaaaaaaaaaaaaaggtggatcttattgctggaaagaacaggcttgtctttaattcacatacctcaatgtaaagaaatgaaaaatagtatgtttagtagtagtttggccagtttttattatttccctaaattttgtcttagaaatcaagaattttggctaacagccattaacttaaactgagggaagataaggaaccctttgtgctacagatgagtaaacattaagtccggggaatttggagattgacattttgtcagtaatactctaaaatttccccttttgttgttttggaacctcgcttgtttttaacctaagtcacagtctaacaggcatcctcagtctgtataatataggacttgatgtgcaggggtggagtaaatttggtaccatgtcaagtaaatcaaagagtgaatcatgaagtgttaactgactgaaacattattcatttacttttgaaatatctctaacttttgaaagaccatgtcctagtttttgttgaagtgaatcagtttttgaagcgtaggcagctcttgatggccaatgcttttggcaacacatatttgaaaggccaaaactatgtttgacttactgaaaattccttagggttctaaaggcaaaagtaccttagtagatcatgaaatgcagtgctaggtttgaagatctctctgctcttaatagagacttttagggaaaatcaagtcatctactgatctcacctcttaccacatgaaataaggactgctgaatatgcacaccagtaacataagcagagcctttcttttctgtacatcttaatttcaaaaagagcatttggctgcatcttgtaatttgcttattgtaccctcaatttaagttattcccatgaagagggactgaatgtttcttaagtaaacttgataaaatatttagattccttaaaagcctacattggctgggcgcggtggctcacgcctgtaatcccagcactttgggaggccaaggcgggcagatcacaaggtgaggagatcgagaccagcctggctaacacggtgaaaccccatctctactaaaaatacaaacaaattagtcgggcatggtggcaggcgcctgtagtcccagctactcgggaggctgaggcaggagaatggtgtgaacccgggaggcggagcttgcagtgagccgagactgcaccactgcactccagcctgggccacaaagcgagactccgtctcaaaaaaaaaaaaaaaaaaagcctacattatttccattaccctcatatctactcacaatggctctctcaacctgacctctcagttagttacatttttgttgcttaggtggaaaaagcagttgtcttgaaactaaatccctgtgcccagctctttctttattgaatggggctgcagtagtaccagtttatgttggaattgagtttcttacattttggaagtttgaccctgaggggcactgttccctgatcatgtagtttaactcacagaacatgtctgtgtagtcacagggagagatccaggattgctgcccattcttaaaactcaacactttgggaggctgaggtgggtggacactggaggtcaggagttcaagaccagcctggccaacatggtgaaaccccgtctttactaaaaacacaaaaattagcccagcatggtggcgcacacctgtaatcccagctactagggaggctgaggcaggagaattacttgagccccagaggcggaggctgaagtgagccagattgtgccgctgcactccagcctgggtgatggggagactccgtgtccaaaaaaaaaaaaaaaccccagcaatggtgttcagtttgttagagtaagattataatgtgtatatgaactctaactttactttgaattgtatgtactcaatacaatcctcatagtgttataagtggtatttttaaaattaaataatatttattttttgtagagatgggggtcttgaactccaggcttcaagcaatcctcttgcctcggcctcccaaagtgctgggattataggcgtgagccactgcgtctggccctgaatggcacttttaaggactgtatgaaacagttatgagccatcagtttgtgatttttccccctgcatcagtatacacattaaaagctgaatgttgctcttttgaatgtttgggatcattccctttttactattgatacacactgtacttgcaaattaactgctctagttctagattttaaggctggaatattttaggacaaaatctataggtgcagttaaggagataagcagctaattgaatctcatgcgttactaataatataaatgtgtttagtctcagttgtttagacagttatcacacagaagggatttggaatacagtttggatacatacgttatgttcatatcgacactgactccgggtgctcccctttccgtgcatagcagagccattgttgatatgttatctactaacgtggctgtcaaaccgccgtggagagtgcctattgcattggtatgctcttcttctactttcatttcacaaatcactttcccaggagcagcagagacaagagtaatct

SEQ ID NO: 1617 - DNA, 22073 bp, Homo sapiens
accctctcccgcccgctccacccgggcgggaattgtttcctcgatcaaatgagtgaaaacctgagtgatcctgtgtctcccgtggtgcgagtgagtcgctgccgctgaaggctaaggggtgggggtgggacttgcgggggtggaaggctaggtggtctccgggctccgcctgggatttgggagaagaacccgcctcctttgcctcggcaatgctcacaagaagataaatcgcactccccaccattttgaacgggggcagatccacagggaagtctcccttggggaatgtaggactagttgcaggctgggggtgttgggaacccgggcattaatcaggtctaaccacagagccggaataattaataccgtattatataccccttttccttctgccgtcatgattctccttggcagcagcgttagcagccgcctgagggtgaaaatgtgggtgatggggaagttggtaatgactccgctgttttttctcatggctcctttgggccacagctgcccgcccccggtatacactgtagttgattgcagggaaaccctgtacctctccctttccttctctaccgattttgcacttttctctatgctcaccaccaagtgtaatcaataacaagcactgacaatacatagcaatagtgaaatctgaaataactaagaattaggtactacagccatggagctggctgggtaaaatctaattggatatttcagtttcattcacctaccctgttttggtgtttggttttggttttggttttggtgagttttttttttttttttttttggaaagcaaggatcacacttccccctccctgttccttaatcccttttctaaaaaggggggaaaatccggatggattttagggattggtctggtgtcagctgtgttttattgcacacctaaatcctgattataggcttttcatttctccgcaaagcctttattttggcagttaagccaaatgtgttttccagaaagttagttattttctcctctttctttcctttctttcctccctttttcccgtctgaccccaaacgttattgtccaaacatgactggacagcagcttttgtttcttgaccctgtaatatgacagtctgctaatattgacagaaggtgcagtttttgggttatagtcgtgattttcgctaatcaatcatattagcaggaaaaaaaatgacttgtttctgttgtacttgagtcttaagaaaaagtgcccatagtttagtgacaatttccaaaggctttagtaccacctgtatttcaaaatgggggacccaaactcccggaagaaacaagctctgaacagactacgtgctcagcttagaaagaaaaaagaatctctagctgaccagtttgacttcaagatgtatattgcctttgtattcaaggagaaggtaatttaaagttcttaatggtgaattagcacaagtaatttttgtaagtgtatattatttgttactcttaaattattatgaatattaggttaaagagtggttgaaaaaaagtctgctttgtatgctctgttttttcacccttaggggtgattctgtgaattgagcagttgcagcatgcgaaaagacccttgagcgttctttggtttggaaataaatttgagtctgaagcttagtagtagtatacactgagttgacatggggtgggcaagattacaaaattttatatggagttaacatgggaaaccttatgatggaatttaaagattatctaatgtagagtataaataagatggttgaaagtgtgaaattgtaatcagactgtttatatgctaaagtttatcctgtttcttaaactgcgtaatgtaggtaaccttttctcttacatttaatgaagtagaatacaccttttaggagcaattaaatactgaaatggttaatttgtgtttagaagtgtgattttcttttttacttagagttcattttgccttgtatagaagtacagtttttaaaaactcaaaatgacctagaggaagtttcatttttaggggcggtggaggtcttaatcagaattagttccgcagttaaatagcaaacagtaagttgtgagtagtcaaggatgggatgataagagcagtattttttgcaacttaaaatgaacattttcttaaattatcagcaaggcttatttgaccaaagatgaggttatgaatgtaaggaagtgctacttggattttggtgcttaaattgttagctaatttcagatcagaaatacaatcttagtgtggtatctattaagtatctggaagttttccaggtttccccctactgtttaactcttattatttttgttgctgagacaggcctcactgtattgcccaggctagtcttgaactcctgggctaaagtgatcctcctgtcatggcattttaaagtgctgggattacaggcaggagctgccacgcacagccccaactcttaactcctaaaaggttatttgtatttaagaacattcttagctgctgaagtatagcattgtgaagtgatttttaagtaatttttgaagtgactgtcccaagattgggtggtatcaaggacttacatctccacttttgttttgttgacaagctgactcaaaattgatgagattggattttagttgaagatgatacagtgtatgctctttaaataaatccaagataataagtagtgagaccatatctttgtatttaatctatatattgccccaaattgcaccatcttaattctttaacaccaacgataatctggttttattctgtgaatggacagtgtccatgcagttgccctgaataattcatgatatatacttaatagtacagaattttaaaaagtagtttagtgatgcgtacttggtcttgagtagtattaaaagagaacttggtgtgcttctttttagtctttcaaatattgatggttttggctgggtgcagtggctcacggctgtaatcccagcactttgggaggctgaggcaggcggatcacttgaggtcaggagttcaaggccagcctggccaaatggtgaaaccctgtctctactgaaaatacaaaaattagccaggtgtggtggcgcaggcctgtaatcccagctactcgagaggctgaggcaggagatcccctcgaacccaggaggcagaggttgcaagtgagccaagatggtgccactgccctctagcctgggcaacacagtgagactccatctcaaaaaaaaaaaagaaaaaccagaaatattgatggttttgataatgtaatattgagaaagtaatggaaattggcccatataaggaataaaactattcatttgtctgaatagcgttgttttaaaactggtgagatttttaattttaagaagtattgtccaaaatagtgctatggataccattatgctataaaactcaagcattaaacattctaatgacagtttgtacatgtatggttggagggggaggtaggggaagaacagaaggaattacctatctgaaaatgtgttttcagtgtataagttactgcagacagttaagaattttgtggagttaatgttacatgacattgtaatatgaactgagtgttaaaaggctgtgctccctgtgggttaatacaccattttcttttcttctagaagaaaaagtcagcactttttgaagtgtctgaggttataccagtcatgacaaataattatgaagaaaatatcctgaaaggtgtgcgagattccagctattccttggaaagttccctagagcttttacagaaggatgtggtacagctccatgctcctcgatatcagtctatgagaagggtaagttctgccttaagtcttgacttgataaagtttctgtggattaaccttgcatttccccgccccccgaaccccccttaaagtggatagttatgatagtgaccagtctcttcaggtaaatttgtctttgtgccatgttgataactgggatcatgactttaaagcattgtgtttataggattagaaaaacacgtttttttacgccagaccattcttatgtggatgaagtatataaagggatttctttaatctgtgttaggtgttgatgatctcggacttttttttttttttttttttttgagacaaagtcttgctctttcgctgaggctagagtgcagtggcatgatcttggctcactgcaacctctgccctcgcgcattcaaatgattctcctgccttagcctcccgagtagctgggactacagttgtgcgccaccatgcctggctaattttttgtgtttttagtagagatggggttttgccatgttggctaggctggtctggaactcctgacctcaagtgatcctcctgccttggcctcccaaagtgctgagattacaggtgtgagccactgcaccctgccagtagccaactgtttttaataatttaagtgttatgcagaaagtttaaaaatttttgaagtaggtttgtttttgaaaacttgaccttgagtaaaacatggacaactttgttgtattaggctcataatattgtgtattattattgtggataaatgtcttatgtctccgtttattgtatttccttttttggggggaatatgaatataaggaagtgcttccagctttgtaaacttctgcaacatgttaaaagttaatctgggcatacctgaaccaagagatccccacagttacttggggagaatgctggagataaccagatactggtctggaagaaattatggaccttcaaaaattaatatgctggctacaataatgaagcagaagtcaggaatggagaaaagtagttttctatcaaaataaaaatagcatttcagctataataggatagtgattcatattaggagttctaagacatctttttaaatagattgatttttaaaggtggaaataaaggttcagggtctgacaatacaacagatatcagagattttgttggagttttcaccatgcactgataagtctaggtcttggtgttaggagcattggactgagtgtatgtgactctctgtaagataaaaattaaaattagagccaggcacagtgacttagcctgtaatcccagcacttcgggaggctgaggtgggtggatcacctgaggtcaggagttcgagaccagcctggctgacgtggtgaaaccccgtctctattaaaaatacaaaaaatattagcggggcatggtggcacacacttgtaatcccagccattcgggaggctaagtcacgagaatcgcttgaacctggtagacggaatttgcagtaagcgaagattgcaccattgcactccagtgtgggccacaaaagttaggactctgtctccaaaaataaaaaattacatcatgagctattcagattataaactattatgtttacttcctaagatataaaatgatatatggtagatcttttgtacttataaaatgtttttataggggaaccctataatttgtgacatggcttgatgtagctgtttctttaaaagtaaacttttttttttttaatcattttataggatgtaattggctgtactcaggagatggatttcattctttggcctcggaatgatattgaaaaaatcgtctgtctcctgttttctaggtggaaagaatctgatgagccttttaggcctgttcaggtattttggtctaaagtgtgatgagtatttcaatatgtgaaaactactagaatataatagggtctaacttgagaaattctttgggaaaatggtttctgatagttttatttcacgagtctcccctatttagaatattgtgatgcaagagaagaaagcgtttggattatagaatctcttgacagtgtggtggttccacctgcccagtgtggctttgaaattatgactagagaaaatcttttaaagtggacatttactgatttatagaggggcccacagatgagcttctgagatctgtaactcttgaagccttcaccacacatccttctaaaaccgtatatttaactgctgcttcccaaaggaatgtgatctgaaatgggtgaagaaatcattttgtagaagttgatctgtatataaaattatagaagaaagaagtaaatttagtagtcattcttaaccttaaaatcttgctgacttttgactgtttgtcatggtatactagacattgctcaagtgaatcccccctctagtgttaagggcatttactcatgttgaacctagttttatttacagtatatttgtatgcatagaagatggaggtccaccaaagtgttaattatgcttagttgtaggtcaggtatagctaactttccttttttaatatatatatttacatttgtgtttcctttataatttatggcatagattgccacgattttcttaagtatacttttataatcagaaaaatgatattaaggactcattttaagtacactaaatcaaatattagaaggcttctttattttaagctaattgtgaggattatttgtcatttaaaacttttgcttctacttattaccctgaagtatctttgtggtgcttatgtttttcacagactgtataaattgatatactctcccgccccatggtaatgttgctacacataagctctaataattatcatttttaatgttttaagattaattcaactaagttttaaaaataatccattggttacatacataagaaagtactgtatacagattcccctgacttataatggttcgacttaagattttttcaactttaccatgatgtgaaagccatatgaattcattgtgctcctcgatttatgatgggactacatccaggtgaagtcattgtaaattggaattgttgtaagttcaaaagtcactttttgatttaaaatacgtgtaacttacactgggtttatcaggatgtaacatcacaagtcgtggagcatctgtatttcggtcatttaatggatgatatctgactgaagggagaaaatgaatataaaaggcatgaaaacaggaatagaaaaggcatgtttaaagttctcagcgcagggctgataactctagctgctctctggaggtggtgttaggattttgttgttttttagttaaggatttcccactggaaaaatgtaggtctgcttattacagtatgttttcaaatttctaataccctgcctttcccactgggaccttatttgaaatagttgagttaactttagtcttgtgtcaaatagtactctttgaagtcatggctgatgtttattgagagttgactgtactagtttcagcttttttttttttttttttttgagacagagtctcactctgttgccagattggagtgcagtagtgtgatcttggctcactgcaacctcctcctccttgcaacctctgcctccgcctccctggttcaaatgattctcctgccttagcctcccgagtagctgggtctacagggacatgccaccacgcccagctaatttttgtatttttagtagagacgggttttcaccatgttggccgggatggtctcgatctcttgacctcgtgattcacccgcctcggcctcccaaagtgctgggattacaggtatgagccaccatgcccgtcctttttttgagacagggtcttgctctgtcgcccaagctggagtgtggtggcgtgatcttggctcactgcaacctctgcctcccaggtttgagccgttcttgtgcctcagcctcttgagtagctgggattataggcgcatgctatgacacccagctaatttttgtattttttttgtagagacggagttttgctatgttggccagggtggtgtccttgacctcaagtgatctgcctggcttggcctcccaaagtggtgggattacgggtatgagccaccacacttggccttagactttctcttactttatatatatttaatctcagtccttaaaataactgggtagataggaagaaactgagacagaaattaggtaaataaggcccaaggcagttaaataggataaaagcctggactgactgtgcttttaactcactaccctgtactgtgaaaatttacctatattaattatagaatcttaaaattctggactgagtgtaagcagtatgatgtaggtaatgactttagaattcaactgcagtaagtaggttaatattgtaagaactaatttgcttttctgaagtaatttaaaatgtgtgaatatcctatatgaggggccttaaatataactcactcagttctttctcaaagaaaatgagaaaaggaatggtaaatgttaacttgcaggcctcttttttttgttttttgttttttgactcttaaagcactttacttatttttaaaatttaattaattttttgtagagatggggtctcactttgttgcccaggctggtcttgaactcctaggttcaagtgatcctcttgcctcagcctcccaaagtgctgagattacaggtgtgagtcaccgtgcctggccttttgaagcactgtaaaacctgaatatatgggtagtgaggatataatcggaaccagaataaggattgtttttaaatactgagttcttcagtgtactgtgaagtgctgggaggtactactaaaatgtatctcttcttttctcttcattattaatgctactgccaaggttagctcctcccctgactgttagaatatttcgttacttctgtgggaattacttctttcatgctgcttatgagaagttgtgtgtgtgtgtttgtgtgtgtgtgtgtgtaccatttcttttcagataagtggatattcaatatgatagaattgaaatgctaaagaactataaggaaggcctttttcagtctcactcaaaccttttttcagtgtggttaccggttcttgcacccaccctggttgcttaccatattgcagctttgttacttgaatagtatttcagtttttaacacatttgtttttgtgttggttctgtttcctagtatggctgttttttttgttttgttttgagatggtgagatggggtattactctgtcatccaggctggagtgcagtggcatagtcatggctcactgcagccttgaactcccaggcccaagtgatcctcccacctcaacctcatgagtagctgggaccacaggtgtgcaccccatgcccaactaattatttttgtagagataggatctcactgtgttgcccgggctggtctcaaactcctggcctctagtgatcctcccgctttggactcccaaagtgctgggattataggtctgagccaccatgcccagtcagcgtttatcagattacttaccattactactttgtcctggggaaatcctcttaatctttaaaggcgcaatccaaaatcataatgttcccgtgttacttactgttacttttttttttttctcctatagtggtttgatgataagaacccaatttgggccgggcgcggttgctcacgcctgtaatcccaacactttgggaggctaagccagatggatcacctgaggtcgggagtttgagaccatcctgaccaacataaagaagtcctatctctactaaaaacacaaaattagctgggcgtggtggtgcatgcctgtattccagctacttgggaggctgaggcagaagaatcgcttgaacccaggaggcggaggttgcagtgagccgagatcgcgccattgcactccagcctgggcaacaagagcgaaattccgtctcaaaaaaaaaaaaaaaattggagttttacagataaccacatcttattctgggaaaggatttgaagcaagttgggttttatatttggctgtacttgtcctcttcagcagtataataagccccttaaggctgaagtaaccttattcctattgtttagtagctaatagcatgcttttgatatgcttatgatcatactaataatttaatatttgaattgtatggaagtacaattcagtatcattttacatatggtatattgtgatgctgtatcatattttatgttacggtttataagaaaagctcctaggtataaaatgctacatagcaggaacttggtttttcaatgttattatttcctactgtttttgacgtaacggcaataaaatttgtttgaaccaaaatggactaacaattatttgtacaactcagtattgtctaaatatcatattgttaaatctaggtttcttgaattctccatcaagcctggtcatgtcatgtagcatttggtgtctcaccatgcccaacagatattttgtgggaggatggagttgatcttcctcatgttaaaagattgaagggagtgttctgacttaattgataacagtctttcataacttcacaaatttttgagaatgacccaaggctaactgtgggaaaaattcacataaaaacatagcctatctatgaggagcaaaactatatttcagttgtgggctttacatttcatttaaccctcttaactgtcctgtgaaatgggttacagccttattttatagatgaggaagctgaagtttaagggatttgcatacggtcacgtaactagtgagttgtgcagctagggttagaataaacagatttattttttttttttcttagaaacagcaattaacaatgtgactcctaatcaaaagaaaagagatgtccttggggcttaaagtactatggtgggagtcttggactgagtaggtttgaaaatacaattttatgatcgtggagtactaggatttagtcattttgatgcagagcatttcctgatcaactgctgttgtggagtgtactgtccaatagaattctctacaattaaggaaatgttctgtatctcaagagattgttcttaatggtggccagtagtcatgtgaccgttgagcatttgaaatgtggctagtgctactgaagaatggaattgtaaattgcttttaatctaaattttgcctgtgatattattggctgtgggtttgccaaaatttgtttttttaaagaggaaaagataacggactgttggctgctttattggacagcacagctagcatatagatgcagataggtagtataacttgtttgtagtttaatataaatgttgtattttgtaattaggccaaatttgagtttcatcatggtgactatgaaaaacagtttctgcatgtactgagccgcaaggacaagactggaatcgttgtcaacaatcctaaccagtcagtgtttctcttcattgacagacagcacttgcaggtaagcagcttttttgaaaaccacttacaggctcattcaaaaacttattggttagtaaacgttttatatacaagttacttaattgttgtgtcccccaaacactgcattatttttgaagttatttaaaaagcaaaaaataggctgggcatggtggctcatgcctgtaatcccagcactttggaaagccgaggcgggcatattgcttgagctcaggaattccagaccagcctgggcaacatgacgaaaccccatctctacagaaaatataaaaactagccaggcatggtggcgtgtgcctgtagtcccagctactggggaggctgaagggggaggattgcttgagcttaagaggctacagtgagatcttgtcactgcactccagcttgaatgacagaacgagaccctgtctcaaaaaataaaatgaatttttaaaaaagtatttcccaggcctcactgtagaacaatggttcccaaattttgctgcatgttacagcaacctggcaagccttttttttttttttaaacgggaaaaaacccacctccttcgaagcttttaaaagtcatgattctagtgaacagtagtgagaactattgccctaaagcgtgtctaccagatgtgtgggcaatggatgaacatcacttgagaacttgttaaaaatatagactctcaggctctactaatcagagtctgcactttaaacagaaccctcaggtgatttgaaacacactttgtttccagaagcactgacctggacgtttttttttttcttgagagggagtctctgtcgcccaggctggagtgccgtggcgcaatctcagttcgctgcaagctccaccttccgggttcacgccattctcctgcctcagcctcccgagtagctgggactacaggtgcccgccaccacgcccagctaatttttttttttttttgtattttagtagagacagggtttcaccatgttagccaggatggtctcaatctcctgacctcatgatctgcctgccttggcctaccaaagtgctgggattacaggcgtgagccaccgcaaccggctgactttttaaatctaaaaggatgagggacatatatttaaaagatccacatttatttcaaataagcacttccatttgggcacagtgtctcacacttgtaatcctagcattttgggaagccgatgggggaggattgcttgagtccaagaccagcctgggcaacagagtgagacgacatctctacaaaaaatcaaagaaattagccggacattgtggcgtgttcctgtggtcctagctactctggaggctgaggcaggggagaatcacttgagcccaggagtttagagttgcagtgagccatggcaccaacacactcctgcctgagtaatgcagcgagaccccatctcaaaaaaaaaaaaaacaccgccaacaacaaataaccacttcccagttaagcagcaatccaagtattgcaatttagtttttagatgcagccacttgctggctgtatgatcttggacaggtaactgctgtgagcatgttgcttctgtgaaattgaacaaatgataatcctaaggttgttaaatttaacgtaaggttgttacatttaaaattaactaatacaagtaaagtatattacatatgtataggtttatttacatttgtaggctacttcagacatcttcaaagtcagagtccttattttgccttttagaggtgctagatagtgaagaaaagatgaactttgtaattaagttggatgttcaaatggtaactactttttaaaaataagggttttgatttaactggtaatactttggcttttttctagtcccttaccccaggatatgcttaaatcttttatttattttttgagacaaggtctcaactctgtcaccacgctggagtacactggcatatggatcatggctcaccgcagccttgacctcctgggcgcaggttatccacctcagcttcccgagtggctggactacaggcgtgtgccaccacatccagctaatttttatattttttgtagagatgggttttcgtcatgttgcccagaatggtcttgaactcttgggctcaagcaatcctcctgactcagcctcccaaagtgctgggattacaggtctgagccaccacacccagccttaaatttttacctattccttcatcctctcactagcttctattcttaccacatctgctttatcttcctctatataaaaatgacttcaaacttctcaaaatctgtccccatgaaatgcctttagctttaatttcttctagcaagtagtctctggtttacttccctaactttttatcttctaattctgcataaatttttcctttatcttatatggcaagattttgtctgtctagaatatggatagggactacaatttgtcccttactctgtatgttaagatgtttaataaattgtgggaaatggacttcatgtgacagttacgctaaagtcttatttttaaaaaatattaaaatgttttccccttccagactccaaaaaacaaagctacaatcttcaagttatgcagcatctgcctctacctgccacaggaacagctcacccactgggcagttggcaccatagaggatcacctccgtccttatatgccagagtagagtactgaccagcaaaatggagaagatcagagaatgcagcagcagttttttttcttgttttcttaccactttattctttcagagtttaaagaaaatggactcatgcacagaacactatgcattttgaaacttgttcatcctggatttttttaaatcatttttatctcagaacttaaacaaaaattagatgtcgtgcacggactgtgtgaaagaagatgctttgcatatttgctgcactgcatcagtatcttactaaaaatgtgaaatgaaaggactattgtacactgaaatgcttaaatgtatctgaaagcacaaggtgatactcatttttatggtcttcccatttgtgctggtttttgcctctttgacatctgtcatcagtatttagagggtgagaagtgaatgtaacaggtataaataacatttttaaaaacaataactttgctataatcacagttgttccagagcactgtcagatacattctaatgaccagaactggtttaaaaaaagaaaatacaaccatgggaaagaaatcttaaatgaaaaacgcatctcattgtaggcatttttgcctcatattttactgggccatgtttgtttcctggtactcatgtattttttttttccagatctctttccccaagttgctattgtaagagtattctgctgcgtgtggatgcagttatacacattaaagcagatctggagtctgaagtagctataaagcagctataaaacagaaatacatgcatagctgcagaaaccatgataggtagaggacttttcttttggttttgttttgttttggtttgttttgtttttggttttacagagaagagatttttattacaaagaaaaaaattccagtgaattgtgcagaaatgctggtttttacaccatcctaaagaaaaactttacaagggtgttttggagtagaaaaaaggttataaagttggaatcttaaattgtaaaattaaccattgagtgtcaaagttctaaaagcagaactcattttgtgcaatgaacataaggaaagactactgtataggtttttttttttttctccttttaaatgaagaaaagctttgcttaagggttgcatacttttattggagtaaatctgaatgatcctactcctttggagtaaaactagtgcttaccagtttccaattgtatttagcttctggttggaatttgaaaaaaaaagaaaaaaagaaaaagaaaacctaaataaaataggtgaaagttccctgactattcaggtgaatacacaaagtttgaagtgttaactttttctttccatttcactgatgttactggtcaccttagagaattatttcatagtctgtggctaaatagtaaattcagaagaaaaatacctggcaattgagtgtgtaacttcaacaagaacaggaatcaagaacatactgtcagctttcaacagttagcaacctggccttatgccttgcttcatgggaaagggccattcttaaatttcaaaatgctttcatgtgtcctcttatttaaaaattagaatctatttgaaataacattttgaatgtttattataaccaggtactcttctaagctcttgtcttaacctctcaacctttggtggaaatagatgcagaggttaagtaacttgctcaagctcagatcataagtagtggaggatttaaaaccaggctggctggctcttaaggcctatgctcttaatttaccatgttgaattaatttaccatattgaattacacttatgttcaccaagttaggcattttggcagccattgtttacgtttttattttggaataatttagaaaagttaccagagtaatatgaaagctgttgtgtaatctttaccctcatttttattattttgccacatttttttcattttctctgtacacttatacctgtgagctatttgagtttgttgcacactttgtgcttccttaccccttccttagtacttcggcatatgttccaagtacaagaatatttcatataactagagtaaaattaccaaactcagggaatgttgatactctttatcatccatattcgttttgttgtcccagtatccttggtagcttgttttagatccccccctctagagtacaggatcattgaatttagttgttctcagttgtctttaatgtggaacagttccttagcctttatgtgttccatgacctctatgttttttggagtacagggcaatttttcttgtaaattgttactcattttgcatttgaattgtttattcatgcttaacgcccttctcaagtatactctccatctgctcttcattgatgttacttttgagcgcctggtcaaggtgtcctggttttgccctatgtgtggtacttactactagcaatctctgggaagcaatgtgcaaataccctgttcctttatcaggagctcccttggcgattctttccagactaaaacccaaaccagtctttaactatgatggttacaaaatagtgattttccaaatctaatgctttgtccatttacagcatttgttgtaagagagtgttctatctctgccatttattatctacctaaacactatggcctcatattttttccctccaaatcataatttgcatgcctttattattttgagcatctcctttcatgcataagatactgtaacctttctgtcccagcctcaagccctggagtcagctgtttctccaaggagcccagcttccttttagtgggaaatactagaagtaaacatctgggactcctgtatgctcactgctgctattgctactgtggagtcttctgccctttcacagtggacagatcagcaggcgatctaatgtagggaaaggatttgtctttaactgttaacttgacttaaatttacttaaagctgcatcctttttagtctttagtcatgaaatgttcattaagattccctgacagaaatcaagtaagagtcagctgggtgcagtggttcacacctgtaagtccagtacttggggggccaaggcaggaggattgcttgagcctaggagtttgagacgaggctgggcaacagtgagaccttgtttctacaaaaataaaattaggcgtggtggcacacgcctgtagttccagctactcaggagactgaggtggaagaatgtcttgagcctgggattttgaggctatgggaagctgtgattgtatcactccagcctgagtgacagaagctgtctcagagtgccacagtcaactgaacttggagacttctgagaagtgaacttggtcttttcaatactatagacttggaggtttgagatctgcatggttttattctcggtacaagaaaaggggctagtagcatgctttttttcttccccctctattggaccatttcctgtaacactaacatgcttagcctcaaacttttcttgaggtcttttttaggcatatggctcaatctattttatttttcaatatgggctgtagttcatatattttgaagtttcataatcttaaaaaaaggaaatgcaagtgtagcttggcattttagatctgggaaggacctaagattcgctaaggattggccattgctgtggtctccatgtgtttcccctaaatttgtatgttaaaatcccaacccccaaggtgatattagcaggtgggggtctttgggaagttattagatcacgagggcagaaccctcaagattggagtaagtgcccttacaaaagagaacccaggctgggcacattggctcacacctgtaatcccagcactttggggggccaaggcaggcggatcacctgaggtcacgagttcgagaccagcctggccaacatggtgaaccctgtttctacaaaaaactacaaaaattagctaggtgtgatggcacatgcctatagtcccagctacttgggaggctgaggcaggagaatcacttgaacccagggggcagagattgcagtgagccgagatcgtgctgctgtactccagcctgggcaacagagcgagactccatttcaaaaacgagaacccagagggctcacttgccccttccaccacacagtgagaaggcaccatctatgagccaggaagcgggccctcacctaacaggatctgctgggccttgacccaggactttccagcttctagaaccatgaaaaatttctgttgttcctagcagcccaaacagaattagaaccattaatttctatttctcctttagcttaacactggactttagttttaatcttaactgagagtggtcctgctagtttctttgctttacctgtttttaaaacactttgagctaagaatttttcacccaattatcacacatgattagaaaacaagatgcttaaagtgaaaaaagacacccccacctttaccctacttgatatccaggtccttttcctccaagaatatttctagctgcttctggttttgctagtttatttcaaaaattacaattgtttgagtcaaatctatacttgatattcattgttgggtttctttaggtcattctgctgttctctcagtttcccaggtgttttgtgtgtcttccttgtgctattaattttcctgtggccttgttggtcagatccacagaggtaaatgcaagtgtttttccttgcttcagaacatgtgctgtaatcactatatcttctcctaattttgcaggtgacatgtaccttgaaagaaaatgaatatagttaacagcagataatttttcaaagggaaagttgtgtgcatctcacaacagtgttcctatgtaacttattttactcctaaaaatagttttaacggtagtattggtaagctttctgtactatcaaatgtgaatggctggtcctaaccaggttctattttacccattccttacccacacaagtttcttttcccaaatatgtgagaagaggttttcttgcctccccttttttccctttacatttcccacttcacatttatttggggctggtgaaagatttcctccagctttcatttaatctccttaacttcttagatgaaatatcacttggtgtctgtatattgtcctatccatatttacaatttatttgactctaaaatgacaatataacaactataaggaattgatatgatgtccttacaatcttgatgatggactgtctatatttttaagagatgtacatcctagtcacttgtaatcataagttgtctttaactcagctggctccagctaattaaaaaaaaaattggggagatgaggattgtttaaaacaaatgttaatgttttaaagggaaataatttccttacagtttatttttatgtttctgctttttagaaagaaacctttaaaaaggatatgtatttttgccatattcaaaataagacttcagtatttatggctaggaggtataagaaaggtggatctggccgggcacgatggctcaagcctgtaatcccagcactttgggaggccgaggtgggcagatcacctgagggcaggagttcgagaccagcccggccaacgtggtgaaaccccgtctcaactaaaaatacagaagttagctaggcatggtggtgggcacctgtaatctcagctacttttgaggctgaggcagaagaatggcaggaacccaggaggcagaggttgcagtgagccgagatcgcgccactggactccagcctgggcaacagagcaagattccatctcacaaaaaaaaaaaaaaaaaaaaaaaaaaggtggatcttattgctggaaagaacaggcttgtctttaattcacatacctcaatgtaaagaaatgaaaaatagtatgtttagtagtagtttggccagtttttattatttccctaaattttgtcttagaaatcaagaattttggctaacagccattaacttaaactgagggaagataaggaaccctttgtgctacagatgagtaaacattaagtccggggaatttggagattgacattttgtcagtaatactctaaaatttccccttttgttgttttggaacctcgcttgtttttaacctaagtcacagtctaacaggcatcctcagtctgtataatataggacttgatgtgcaggggtggagtaaatttggtaccatgtcaagtaaatcaaagagtgaatcatgaagtgttaactgactgaaacattattcatttacttttgaaatatctctaacttttgaaagaccatgtcctagtttttgttgaagtgaatcagtttttgaagcgtaggcagctcttgatggccaatgcttttggcaacacatatttgaaaggccaaaactatgtttgacttactgaaaattccttagggttctaaaggcaaaagtaccttagtagatcatgaaatgcagtgctaggtttgaagatctctctgctcttaatagagacttttagggaaaatcaagtcatctactgatctcacctcttaccacatgaaataaggactgctgaatatgcacaccagtaacataagcagagcctttcttttctgtacatcttaatttcaaaaagagcatttggctgcatcttgtaatttgcttattgtaccctcaatttaagttattcccatgaagagggactgaatgtttcttaagtaaacttgataaaatatttagattccttaaaagcctacattggctgggcgcggtggctcacgcctgtaatcccagcactttgggaggccaaggcgggcagatcacaaggtgaggagatcgagaccagcctggctaacacggtgaaaccccatctctactaaaaatacaaacaaattagtcgggcatggtggcaggcgcctgtagtcccagctactcgggaggctgaggcaggagaatggtgtgaacccgggaggcggagcttgcagtgagccgagactgcaccactgcactccagcctgggccacaaagcgagactccgtctcaaaaaaaaaaaaaaaaaaagcctacattatttccattaccctcatatctactcacaatggctctctcaacctgacctctcagttagttacatttttgttgcttaggtggaaaaagcagttgtcttgaaactaaatccctgtgcccagctctttctttattgaatggggctgcagtagtaccagtttatgttggaattgagtttcttacattttggaagtttgaccctgaggggcactgttccctgatcatgtagtttaactcacagaacatgtctgtgtagtcacagggagagatccaggattgctgcccattcttaaaactcaacactttgggaggctgaggtgggtggacactggaggtcaggagttcaagaccagcctggccaacatggtgaaaccccgtctttactaaaaacacaaaaattagcccagcatggtggcgcacacctgtaatcccagctactagggaggctgaggcaggagaattacttgagccccagaggcggaggctgaagtgagccagattgtgccgctgcactccagcctgggtgatggggagactccgtgtccaaaaaaaaaaaaaaaccccagcaatggtgttcagtttgttagagtaagattataatgtgtatatgaactctaactttactttgaattgtatgtactcaatacaatcctcatagtgttataagtggtatttttaaaattaaataatatttattttttgtagagatgggggtcttgaactccaggcttcaagcaatcctcttgcctcggcctcccaaagtgctgggattataggcgtgagccactgcgtctggccctgaatggcacttttaaggactgtatgaaacagttatgagccatcagtttgtgatttttccccctgcatcagtatacacattaaaagctgaatgttgctcttttgaatgtttgggatcattccctttttactattgatacacactgtacttgcaaattaactgctctagttctagattttaaggctggaatattttaggacaaaatctataggtgcagttaaggagataagcagctaattgaatctcatgcgttactaataatataaatgtgtttagtctcagttgtttagacagttatcacacagaagggatttggaatacagtttggatacatacgttatgttcatatcgacactgactccgggtgctcccctttccgtgcatagcagagccattgttgatatgttatctactaacgtggctgtcaaaccgccgtggagagtgcctattgcattggtatgctcttcttctactttcatttcacaaatcactttcccaggagcagcagagacaagagtaatct

SEQ ID NO: 1618 - DNA, 1346 bp, Homo sapiens
ggaaggcctttttcagtctcactcaaaccttttttcagtgtggttaccggttcttgcacccaccctggttgcttaccatattgcagctttgttacttgaatagtatttcagtttttaacacatttgtttttgtgttggttctgtttcctagtatggctgttttttttgttttgttttgagatggtgagatggggtattactctgtcatccaggctggagtgcagtggcatagtcatggctcactgcagccttgaactcccaggcccaagtgatcctcccacctcaacctcatgagtagctgggaccacaggtgtgcaccccatgcccaactaattatttttgtagagataggatctcactgtgttgcccgggctggtctcaaactcctggcctctagtgatcctcccgctttggactcccaaagtgctgggattataggtctgagccaccatgcccagtcagcgtttatcagattacttaccattactactttgtcctggggaaatcctcttaatctttaaaggcgcaatccaaaatcataatgttcccgtgttacttactgttacttttttttttttctcctatagtggtttgatgataagaacccaatttgggccgggcgcggttgctcacgcctgtaatcccaacactttgggaggctaagccagatggatcacctgaggtcgggagtttgagaccatcctgaccaacataaagaagtcctatctctactaaaaacacaaaattagctgggcgtggtggtgcatgcctgtattccagctacttgggaggctgaggcagaagaatcgcttgaacccaggaggcggaggttgcagtgagccgagatcgcgccattgcactccagcctgggcaacaagagcgaaattccgtctcaaaaaaaaaaaaaaaattggagttttacagataaccacatcttattctgggaaaggatttgaagcaagttgggttttatatttggctgtacttgtcctcttcagcagtataataagccccttaaggctgaagtaaccttattcctattgtttagtagctaatagcatgcttttgatatgcttatgatcatactaataatttaatatttgaattgtatggaagtacaattcagtatcattttacatatggtatattgtgatgctgtatcatattttatgttacggtttataagaaaagctcctaggtataaaatgctacatagcaggaacttggtttttcaatgttattatttcctactgtttttgacgtaacggcaataaaatttgtttgaaccaaaatggactaacaattatttgtacaactcagtattgtctaaatatcatattgttaaa

SEQ ID NO: 1619 - DNA, 2177 bp, Homo sapiens
caaaagctgacgacttcggtctgcgccggaagtgcatgagctgccgatgtggtgcttagtgattgcggtttcggtcgctctcccgtgtttcccgggctgggtatttgcctcgcaccatggcggtaaggaggatggatagggcggggtccgcaccagcaaagctctccaggggctgtgagagtgaaaactgagaaagaacattaagggatatggggtgggccagagcggggcgccatccctggccagaccgtgctagagctgggctggggggatggcggcgcaggaccataccaggactagtgccagagcggggtgggcatcagtaccagggcaggccagagatctaagtgacctgaggtgggggttaacccagatcgggactacgccagcggaggcctgagagaggcaccattcaactccgctcaggagtacccttggaagagtcgttagcctaaagccagactaccacgggatccagaggcggtattagcttaggattgaattgttccagggcgagcaagaggcgattgatcctagctgcgggtgctggagagatggcgtcagccctaggcagaatggactggaggatgggtggacatcccagggattttgctaggtttctgcactacggggacctggctgagttgcggatggagctctatagctcaccaggctggtggggagaatgaggaggaccgtggcctcctgacggcatctcatcattcctctgcagcccaagggcaaagtgggcacgagagggaagaagcagatatttgaagagaacagagagactctgaagttctacctgcggatcatactgggggccaatgtaagtgcctacctccttgcttctatgcccacttatagtcagttccctagtcctcagccctgcttggtgacgaggagtggtacccgaaaaagctctagaagagagctccagtcaaaaagaaatgagagatctgggcacagagaaagtgctaactagtaaaacacaaagaaaatgaaggcgtgagtcgtagctgaatttgagagctcttcctacctccaagtacacaaaggcttctttcctgggctgagttgggtgtcagaggagagtgggtatttgggattcagggagcagggccctttcttcaaccctgtaagaacaaccttgctcctcccacagcctggcctaattcttggtcagagttgagggagacccatggtttggaggtaacttctgaccccaacctgatcctgtgattgcttgcaggccatttactgccttgtgacgttggtcttcttttactcatctgcctcattttgggcctgggtaagtatctccatcctgggaggtggatgagtgcgtagggtcagtggctggcctttgataccctcattcttgctctgcagttggccctgggctttagtctggcagtgtatggggccagctaccactctatgagctcgatggcacgagcagcgttctctgaggatggggccctgatggatggtggcatggacctcaacatggagcagggcatggcagagtgagtgtcccccaccgccagcccaggtgagcggccccagggctggggcccagatagcccaagaagcacagctacttgtaacttgaaaagggtggaagggagttgcaacttgaaaagggtggaagggcccatatgctgtctttccagctttatttctatccacaggcaccttaaggatgtgatcctactgacagccatcgtgcaggtgctcagctgcttctctctctatgtctggtccttctggcttctggtatgtgggctgggggcgctcccaagaaggggcatctaaccctccccatcttttattccctgcatcttgcttcaagttaccgtttctcttgtaggctccaggccgggccctttacctcctgtgggtgaatgtgctgggcccctggttcactgcagacagtggcaccccagcaccagagcacaatgagaaacggcagcgccgacaggagcggcggcagatgaagcggttatagccattgacattgtggccacaggccactggccctgggtggctctgtcagggtgcacagcccctcatgcctggagcaatgagggtctagtccaggggccaaaagcagtctgaggtattgggtatacttatactctatagggtcgttgaataaatggcttagaatgtgg

SEQ ID NO: 1620 - DNA, 2177 bp, Homo sapiens; identical to SEQ ID NO: 1619

SEQ ID NO: 1621 - DNA, 8925 bp, Homo sapiens
gttggattagctaagaaaattttattttgctccgtgcgttcaaggagctcacacacatgcacatgcatatgcatgcacacacacacatacacacacactcacatgcatacacacacggctaatactgctcaaggcatggctcctgggcacagagttctggggccagaattctgctctgggccctcctcactctgtcatctcctgcactgcagtccagggtccagatagatttccgggatacagcaccttcacacctccaggccaggacccttgcttagtcccagtgcctgcaccaggtcatctccgagcccactcttcaacgtccttctcactgcagggacagagcagggttggagggggttgatggggttcaggtgggcagtgggattgtggggggttacttacaagacttgcggttgccgcgggaacgcttgcgttccctagcagctaaggcacgaggactgctcttggtcactgactgcaccagaaggtccatgatctcatctgatgtatcactgggtaaactggagcctgggggttcttctggggatgcagtggagggccccactgtgggcatgattggggagctgctctggaccatgcctgaggaaggccagatagcaaagtcaggccaaggtggcactggagcccattccccacagctgctatgggcctcacctctgctgcggcgattgtgtgtggtgtcctcaggcctgctggtcagcagactcttcatactagcatgactgtcagcatctccccggcctggcccgctgctcactgctactgggacagaggggttgctgggggcttccccagccacacctgagaacttctctgtctggagaaagaagaagggtgagctgggaggagcgaaggaaaccaaggaggtggcagtcaagactaagacctggaagggcacccacctcggtgatcatgcgtccccgggtcttgttgcgctcacggtatgtggcctgcttctgctgctgctgtagcactcgttcccggcaagtccgatactcaagcgcaaattcccgcagcgtgtggcagaactgcatgatgcgcacttcacgggccgcctgcggggtgtagcccaggtagagcaggaaggcatggaacctaggcaggtcagagtagggagggacagtaagtcctgcttattgtctgagggagggtggtggccgtcctgcctctcttgggtccatgcccctacctattgcagacacggcggtgcactatccttagcatggcaacacggcgggcacactggtccaggaagtgggtgaggcgggcacgcagggctggggccagctcatgcttggccaagctccgcaggctctcctcggctgcccggctccggcgctccagctgccccaggttctcagtcagctgttcaaagtccacctgagaaagcaagggggtgcacatactgtccccccacaccctgtagacaagacatggcccgaggctgcttctgggccagagtggccagcttgggccctaaggacacagacatccaaatctcatagactagtgcaagagacacaagtccatctgatgtgaatggggagcagaaggtttactgggggaagtggcagttaaacagacccaaagactgagtaggtgtggccaggccaatagaggaaagagcatttctggcagagggcatagctcacacccaggtggctggagcaagccctggcacagcagcccaaatggggagaagggggaggagccaggcccaggaagcagcgctcctcatgccttgtccggccttggttgattctggcaggtgctaaccttggcacagcgggtcagggcagggatttctgaatagaggtcagaggactcaggccgggtctggagcactagggagcagagatggtgtagcagtgactgtcgacgcaccgtgtccttcacctctgacaccttctccaggtagctcagctcaaagccgctgctctgaaaggaccctttctgagcctgggcctggttggctccagaaccctgactccccctagtccccatgtactctcactcacctgggagccattgaggaagttgcccaccgctaggagggtagccaggatgcagcggaaggtggcattctgtaccagctgttccatacccactttcaggtcaaacagtggctcagcaatttcctggtatgggagaccagggactctcagactacatggtcatgatgcttacctgtccctactgactgtcccactccaagacccaggtacccgctccatgctgtcatagtccagcttgaaggcccagagttgtagacgagcagcgaggccgccaatggaggcaagagtcatcaggaagttctcggctgggcccaggggtatgtcagggttggccagctgggcttcctcaatcttctgccgctcttcctccgtgggcatcatggtcagtagcttctgaggatgtagccagagcctgacatggccccctcaatgcaggcctgaggcctgaggcattggtcttgacccctcagtcatctaggggaggccccagtgtctggggactgccctgcagaaatgccaagcccatgcccaccaccagagggacaggaaatgcccacctaccaaaggagaaggccagacctccccccaacacccatagctgggtgacctcacctcaatgccatccttgctgacagcaaactcatcaaagttgagcagagcagccttaatgacatgcacaggtggcagtgtggttaggccgatgttgatggcgttgctgcgcttggggtccagcactgtggtcattgtccggcggccctctccagctttctgcatggttgggggaagggcagtgtaagactgaggaagggggcctgacgcggtggctcacgcctgtaatcccagcactttgggaggccaaggcgggtggaccacgaggtcaggagatcgagaccatcctggctaacatggtgaaaccccatctctactaaaaatacaaaaaaaattagctgggcgtggtggcgggcacctgtagtcccagctactcgggaggctgaggcaggagaatggcgtgaacccgggaggcggagcttgcagtgagctgagatcacaccattgcactacatcctgggtgactgagcaagactctgtctcaaaaaaaaaaaaaaaaaaaaaaagactgaggaagggactagctgggacagcaacctcagagggcactccaaggccctcctctagattgccaaatgatcccacaactgacaaactggcaacctggaatgtgtaagtcatggggatgagcttagattcttttgagacagggcctggctctaccatctaggctggagtgcagtggtgccatcatcgcccactgcagcttatcttctgggattttcctgcctcagcctcccaagtagctgggattacaggcgtgtaccaccatacccaactatttttttttttaacatttttttttccgcctcccaggttcaagcaattcttttgcctcagcctcccaagtagctggtattgcaggcatgagccaccacgcccagctcattttcatatttttagtagagacggggtttcaccatgttggccaggctggtctcaaactcctggcctcaagtaatctgcctgccttggcctcccaaagtgctgggattacaggggtgagccaccatgcccggctaattttttttttaacatttatttatttttatttatttagttatttttgagacgaagtcttgctcttgtcccccaggctggagtgcaatggtgcgatctcgactcactgcaacctctacctcccgggttcaagtgattctcctgcctcagcctcccgagtagctgggattacaggtgcccgccaccacgcttggctaattttgtgtttttagtagagacggggttttgctaatttgaccaggctggtctcgaactcctgacctcaaatgatccacctgcctcggcctcccaaggtcctgggattacaggcatgagccactacacccagaccaacttttagtagagataatgtctcactatgttgcacaggctggtctcaaactcttggattacaggtgtgagccaccatgcccggccacatttagattctagttggggcactgctgatcccttgttaggagaccttggacaatttcctactcctttctttgccttggtttccccatgtgggaagtgagtgactagctccaacaggtcagatccttaagctctgattccctcctgcctcccttggggctaccttgcagatgagtggatttaccttggagggcagcacctctttggcacgagactcaaagaggtgttccagtcgggccgtgtccactgagacagggtccagtgaagcccagagggtggcgcagggcccaaagcggcttgcagagactccatggcccccagccagcttcagctcacgccagaaaagttttactgtcttcctcttagtggggagggctgagctgtcaggcactgaatggggaagaggggcagccagaggtagaggtggaggtggtgggaaggggcctttgatgggtgggggaggtggaagtgggggaggggggggtactcccgagagcaggggcagtgggggtgagggagctgggatgtctttcccagcctccacagactctacattcagcatgtcctggtcttcatcctcccctagatctgaaaagtccaggtccccaatagagagcctgggtgcacgggtagggagctcccagatgggctcagccttggggcttgctggtatcagtggctccttgggctctggtgcaaggcttcgctgggcccggagcaggacacagggggcagggctctggggtgttctggctgcaggggctgtctctggggagtcccagagttgccgggcatctaaagaaagggaaggagctgtcagtgccatgccccctgtggggcaacaaagcaacaggcaggctctgcctgctcacccacctactcacctgggtgtccacccgcctcattgggcatggccccggcaagtgtctctgcccggccctgggccagcgcaacctgcttctctgtttctgctgccgccacattctccaggaaccgggctctgagggaaggtgcttgtcactgacagcgtctgacacaccccagcccaggtgtacatgccttgctgagcccctggacaccacccccaattgcaggcacgcacagacacacagggaacagtccatgcgctgagcagaccagaaccacaccccccccaaggccagcccctcttcagtcctccacatctggggaggattactaccaacccagcattcccaggtgaaaacacagggagaggatctacttaacatctaacttgcaacctcgttcatgttcactgtcctggtttttttttggttggttttttttttagagacagggtctcactctgtcagtcacccaggctggagtacagtggtgtgatcatagctcactgcagcctcactctcctgggcttgaccctcagcctcccaagtagctgggactacagacatgtgccaccacgtccagctgattttttaatttttttgaggagacagggtctcactgtgttgttcaggctggccttgaattcctggcctcaagcagtcctcccacctcagcctcctgaagtgctgagattacaggtgtgaatgatgcacccagccaaattttaaaaaatttctttgtagagatgaggtcttactgtgttgcccaggctggtgtcttgagtctagacaaggactcttagagcaggggaaggggatagctgtcccaatgggcatatcaggctgtccctcccttggcatgtctggtagcttctgggagcctatgcccaggaaagggcctggtaaacaggccaggtgcggtggctcacgcttgtaatcccagcactttgggaggcagaggtgggtggattacttgaagtcaggagttcgagaccagcctggccaacatggtgaaaccctgtctctactaaaaatacaaaaattacccaggtatcctggtgcaggcctataatcccagctacttgggaggctgaggcaggagaattgcttgaacctgggaggcagaggttgcagtgtgctgagatcacaccactgcactccagccttggagaccgagcaagactctgtctcaaaaaaaaaaaaaacaaaaaaaaaacggatgtggtaaacagtggaccctcagtttatgctgaaataatgggtgcaatccagtgtttcttttctggcccctccagcctctgtcagctctcagtccctgcctttccctcagccttaggttacccctccacccccacaccacacaccacacagcaccctaggtcccctccctgctcgcttctgagctgaagacttggcagaatgagccccaggttgggtgtccacatccccatctctggctgctaaggtgttgctattgaagcacagggaccactgtgaccccagtgaattggttcccagtgcttagcctttgggttaccgaggaggcatatgtctgggagaggataggcctgagtcccccagctttggttgcatcaggcacgtgaaacccctgctgggggaagcaatgctgaagccctgagcacatggcaggcctggcaggccggcctctgtacttactccagcctggcctgcccaggaggggactgggggacgggtgggctctcaggggccctgggtaggggggatgagaggaagagatggtaactgtggtgtcagctccatggttgctcatacccacacagagctaggcagtgatattggggttccttcccagccgcagtgggaagtgggggaaggtatgacacgaggaaactggaagtggaggggagagactgacgtggagcaggacagggtgctggaagagacagaggcagcagaacaagggagtgacagatagtgggcgggagacatgacaagaggcaaagacaggcagaacgtcggaggagacaaaggaaaccacaggaggaggagatccagtcagagccgaaccccacccgctggcagtcacttaccaaacggaagcagtttggtgaagtctggaaagagagagagagaaagcacgcgtttgggcagaggaggctgagtgcccatggaggggcgcaaagcggagggacaatgggagagaggactccagggtggcctctgtctccctacttacttgtagatgctcctctcgctggaggtgtcagctgagggtgccacagagatggtaggaaaaaggttcactgaagcttggagaccggagggagggcccacagggctggaggcggggcctgtcagcagggcggggccggtggaagaggtggggcctaccggtgaggcggggcctgtggggctgaaagcaggggctgtcagtggggcggggcctgagaagctggaggcggggcctgtcagtggggtggggcctgcggggcgggaggtggggcatgtcggtagggcaggcccagtggaggaggtgggggctgtctgtggggcggggcctgagggggttggggtcagggcctgtcagctcactgggccatgcctagtagatccaccctttcccatctacagatgctcgtacttacccaggttccggggcacgcgcggggcagcccccgccttccagagaacggcggctcctcttgccctcctcagaagaaggctttcgtcgttcccgccgcccaccagcgcctggggcttcttcgatgtctccatcctccaatttcagggcgttctagcagaggcggaccaggatgtaagaaagtggttaacgtgtatgcaggtggggtggggcgctggggactgcgcttctctcttccctctttccaatccgcctcagagcgtaaggcccggcccacctcgtagagcacaagctgcgtgcgcaggtcgacgtcagtgcccgcagtgcccaggtggcgctggaccagcgcttccatgccctgctgctccagtgcatccgtcacatcgtagaaggagtcctggtccgggagcgccgccagcgtctggagggcggggataagaaggcaaggctgaggttggtggggaggtcaggagcctgagcatcccagagctggcacccagtccttggccacaccttgttgatgagggtgaccgtgtacaccaacaactcagggtcagcgccattcttctcctccaggatggacaccagattggcccagggaggagcacctgccacacagaaagtggagcagtcatgggggaacaggtaggagagagggctctgagcggtggggggagaaagggacagtctctgaccggtggtgctggccacagagttcactgcacggatgaacagcggtgcgttgttttcggagtattctacaaacaccaacagcagcttcagggctgtcttcaccaccaagcgggactgaggagagaggtcagtacatatgagtggggcttaggccagacctgtgccagctgttgctggggaaggggaagggctgctggggctggacccagagagaatctaggcagaatgaccctggccccaggcccaggcactgaagtgccttataggcttacagaggcctcagactcactcccttccagctcactttgcagaacaggaaactgaggcccagagagaagcaacaggcaaagggtataaggctgagtggagagccacttaccaggctggcacacaatgtgtacagccactgaatagtgtcactgtgggccaccacccccagcattccatccacaaagagcatcagctggccgagcgctggggaaacagggatgggcagagtcagcgagggtcgctggagcagaggtcatgggagaggggcggggctgacctctaaggatgtagctctggtagttgtggtcggcagcagcacccacacggatcaggcagctcagcccctctgaatgcacaaattcaggcaccaggtctttgtcctcctaga

SEQ ID NO: 1622 - DNA, 8924 bp, Homo sapiens
gttggattagctaagaaaattttattttgctccgtgcgttcaaggagctcacacacatgcacatgcatatgcatgcacacacacacatacacacacactcacatgcatacacacacggctaatactgctcaaggcatggctcctgggcacagagttctggggccagaattctgctctgggccctcctcactctgtcatctcctgcactgcagtccagggtccagatagatttccgggatacagcaccttcacacctccaggccaggacccttgcttagtcccagtgcctgcaccaggtcatctccgagcccactcttcaacgtccttctcactgcagggacagagcagggttggagggggttgatggggttcaggtgggcagtgggattgtggggggttacttacaagacttgcggttgccgcgggaacgcttgcgttccctagcagctaaggcacgaggactgctcttggtcactgactgcaccagaaggtccatgatctcatctgatgtatcactgggtaaactggagcctgggggttcttctggggatgcagtggagggccccactgtgggcatgattggggagctgctctggaccatgcctgaggaaggccagatagcaaagtcaggccaaggtggcactggagcccattccccacagctgctatgggcctcacctctgctgcggcgattgtgtgtggtgtcctcaggcctgctggtcagcagactcttcatactagcatgactgtcagcatctccccggcctggcccgctgctcactgctactgggacagaggggttgctgggggcttccccagccacacctgagaacttctctgtctggagaaagaagaagggtgagctgggaggagcgaaggaaaccaaggaggtggcagtcaagactaagacctggaagggcacccacctcggtgatcatgcgtccccgggtcttgttgcgctcacggtatgtggcctgcttctgctgctgctgtagcactcgttcccggcaagtccgatactcaagcgcaaattcccgcagcgtgtggcagaactgcatgatgcgcacttcacgggccgcctgcggggtgtagcccaggtagagcaggaaggcatggaacctaggcaggtcagagtagggagggacagtaagtcctgcttattgtctgagggagggtggtggccgtcctgcctctcttgggtccatgcccctacctattgcagacacggcggtgcactatccttagcatggcaacacggcgggcacactggtccaggaagtgggtgaggcgggcacgcagggctggggccagctcatgcttggccaagctccgcaggctctcctcggctgcccggctccggcgctccagctgccccaggttctcagtcagctgttcaaagtccacctgagaaagcaagggggtgcacatactgtccccccacaccctgtagacaagacatggcccgaggctgcttctgggccagagtggccagcttgggccctaaggacacagacatccaaatctcatagactagtgcaagagacacaagtccatctgatgtgaatggggagcagaaggtttactgggggaagtggcagttaaacagacccaaagactgagtaggtgtggccaggccaatagaggaaagagcatttctggcagagggcatagctcacacccaggtggctggagcaagccctggcacagcagcccaaatggggagaagggggaggagccaggcccaggaagcagcgctcctcatgccttgtccggccttggttgattctggcaggtgctaaccttggcacagcgggtcagggcagggatttctgaatagaggtcagaggactcaggccgggtctggagcactagggagcagagatggtgtagcagtgactgtcgacgcaccgtgtccttcacctctgacaccttctccaggtagctcagctcaaagccgctgctctgaaaggaccctttctgagcctgggcctggttggctccagaaccctgactccccctagtccccatgtactctcactcacctgggagccattgaggaagttgcccaccgctaggagggtagccaggatgcagcggaaggtggcattctgtaccagctgttccatacccactttcaggtcaaacagtggctcagcaatttcctggtatgggagaccagggactctcagactacatggtcatgatgcttacctgtccctactgactgtcccactccaagacccaggtacccgctccatgctgtcatagtccagcttgaaggcccagagttgtagacgagcagcgaggccgccaatggaggcaagagtcatcaggaagttctcggctgggcccaggggtatgtcagggttggccagctgggcttcctcaatcttctgccgctcttcctccgtgggcatcatggtcagtagcttctgaggatgtagccagagcctgacatggccccctcaatgcaggcctgaggcctgaggcattggtcttgacccctcagtcatctaggggaggccccagtgtctggggactgccctgcagaaatgccaagcccatgcccaccaccagagggacaggaaatgcccacctaccaaaggagaaggccagacctccccccaacacccatagctgggtgacctcacctcaatgccatccttgctgacagcaaactcatcaaagttgagcagagcagccttaatgacatgcacaggtggcagtgtggttaggccgatgttgatggcgttgctgcgcttggggtccagcactgtggtcattgtccggcggccctctccagctttctgcatggttgggggaagggcagtgtaagactgaggaagggggcctgacgcggtggctcacgcctgtaatcccagcactttgggaggccaaggcgggtggaccacgaggtcaggagatcgagaccatcctggctaacatggtgaaaccccatctctactaaaaatacaaaaaaaattagctgggcgtggtggcgggcacctgtagtcccagctactcgggaggctgaggcaggagaatggcgtgaacccgggaggcggagcttgcagtgagctgagatcacaccattgcactacatcctgggtgactgagcaagactctgtctcaaaaaaaaaaaaaaaaaaaaaaagactgaggaagggactagctgggacagcaacctcagagggcactccaaggccctcctctagattgccaaatgatcccacaactgacaaactggcaacctggaatgtgtaagtcatggggatgagcttagattcttttgagacagggcctggctctaccatctaggctggagtgcagtggtgccatcatcgcccactgcagcttatcttctgggattttcctgcctcagcctcccaagtagctgggattacaggcgtgtaccaccatacccaactatttttttttttaacatttttttttccgcctcccaggttcaagcaattcttttgcctcagcctcccaagtagctggtattgcaggcatgagccaccacgcccagctcattttcatatttttagtagagacggggtttcaccatgttggccaggctggtctcaaactcctggcctcaagtaatctgcctgccttggcctcccaaagtgctgggattacaggggtgagccaccatgcccggctaattttttttttaacatttatttatttttatttatttagttatttttgagacgaagtcttgctcttgtcccccaggctggagtgcaatggtgcgatctcgactcactgcaacctctacctcccgggttcaagtgattctcctgcctcagcctcccgagtagctgggattacaggtgcccgccaccacgcttggctaattttgtgtttttagtagagacggggttttgctaatttgaccaggctggtctcgaactcctgacctcaaatgatccacctgcctcggcctcccaaggtcctgggattacaggcatgagccactacacccagaccaacttttagtagagataatgtctcactatgttgcacaggctggtctcaaactcttggattacaggtgtgagccaccatgcccggccacatttagattctagttggggcactgctgatcccttgttaggagaccttggacaatttcctactcctttctttgccttggtttccccatgtgggaagtgagtgactagctccaacaggtcagatccttaagctctgattccctcctgcctcccttggggctaccttgcagatgagtggatttaccttggagggcagcacctctttggcacgagactcaaagaggtgttccagtcgggccgtgtccactgagacagggtccagtgaagcccagagggtggcgcagggcccaaagcggcttgcagagactccatggcccccagccagcttcagctcacgccagaaaagttttactgtcttcctcttagtggggagggctgagctgtcaggcactgaatggggaagaggggcagccagaggtagaggtggaggtggtgggaaggggcctttgatgggtgggggaggtggaagtgggggaggggggtggtactcccgagagcaggggcagtgggggtgagggagctgggatgtctttcccagcctccacagactctacattcagcatgtcctggtcttcatcctcccctagatctgaaaagtccaggtccccaatagagagcctgggtgcacgggtagggagctcccagatgggctcagccttggggcttgctggtatcagtggctccttgggctctggtgcaaggcttcgctgggcccggagcaggacacagggggcagggctctggggtgttctggctgcaggggctgtctctggggagtcccagagttgccgggcatctaaagaaagggaaggagctgtcagtgccatgccccctgtggggcaacaaagcaacaggcaggctctgcctgctcacccacctactcacctgggtgtccacccgcctcattgggcatggccccggcaagtgtctctgcccggccctgggccagcgcaacctgcttctctgtttctgctgccgccacattctccaggaaccgggctctgagggaaggtgcttgtcactgacagcgtctgacacaccccagcccaggtgtacatgccttgctgagcccctggacaccacccccaattgcaggcacgcacagacacacagggaacagtccatgcgctgagcagaccagaaccacaccccccccaaggccagcccctcttcagtcctccacatctggggaggattactaccaacccagcattcccaggtgaaaacacagggagaggatctacttaacatctaacttgcaacctcgttcatgttcactgtcctggtttttttttggttggttttttttttagagacagggtctcactctgtcagtcacccaggctggagtacagtggtgtgatcatagctcactgcagcctcactctcctgggcttgaccctcagcctcccaagtagctgggactacagacatgtgccaccacgtccagctgattttttaatttttttgaggagacagggtctcactgtgttgttcaggctggccttgaattcctggcctcaagcagtcctcccacctcagcctcctgaagtgctgagattacaggtgtgaatgatgcacccagccaaattttaaaaaatttctttgtagagatgaggtcttactgtgttgcccaggctggtgtcttgagtctagacaaggactcttagagcaggggaaggggatagctgtcccaatgggcatatcaggctgtccctcccttggcatgtctggtagcttctgggagcctatgcccaggaaagggcctggtaaacaggccaggtgcggtggctcacgcttgtaatcccagcactttgggaggcagaggtgggtggattacttgaagtcaggagttcgagaccagcctggccaacatggtgaaaccctgtctctactaaaaatacaaaaattacccaggtatcctggtgcaggcctataatcccagctacttgggaggctgaggcaggagaattgcttgaacctgggaggcagaggttgcagtgtgctgagatcacaccactgcactccagccttggagaccgagcaagactctgtctcaaaaaaaaaaaaaacaaaaaaaaaacggatgtggtaaacagtggaccctcagtttatgctgaaataatgggtgcaatccagtgtttcttttctggcccctccagcctctgtcagctctcagtccctgcctttccctcagccttaggttacccctccacccccacaccacacaccacacagcaccctaggtcccctccctgctcgcttctgagctgaagacttggcagaatgagccccaggttgggtgtccacatccccatctctggctgctaaggtgttgctattgaagcacagggaccactgtgaccccagtgaattggttcccagtgcttagcctttgggttaccgaggaggcatatgtctgggagaggataggcctgagtcccccagctttggttgcatcaggcacgtgaaacccctgctgggggaagcaatgctgaagccctgagcacatggcaggcctggcaggccggcctctgtacttactccagcctggcctgcccaggaggggactgggggacgggtgggctctcaggggccctgggtaggggggatgagaggaagagatggtaactgtggtgtcagctccatggttgctcatacccacacagagctaggcagtgatattggggttccttcccagccgcagtgggaagtgggggaaggtatgacacgaggaaactggaagtggaggggagagactgacgtggagcaggacagggtgctggaagagacagaggcagcagaacaagggagtgacagatagtgggcgggagacatgacaagaggcaaagacaggcagaacgtcggaggagacaaggaaaccacaggaggaggagatccagtcagagccgaaccccacccgctggcagtcacttaccaacggaagcagtttggtgaagtctggaaagagagagagagaaagcacgcgtttgggcagaggaggctgagtgcccatggaggggcgcaaagcggagggacaatgggagagaggactccagggtggcctctgtctccctacttacttgtagatgctcctctcgctggaggtgtcagctgagggtgccacagagatggtaggaaaaaggttcactgaagcttggagaccggagggagggcccacagggctggaggcggggcctgtcagcagggcggggccggtggaagaggtggggcctaccggtgaggcggggcctgtggggctgaaagcaggggctgtcagtggggcggggcctgagaagctggaggcgggcctgtcagtggggtggggcctgcagggcggaaggtggggcatgtctgcagggcacgcccagtggaggaggtgggtggctgtctgttggggcgggcctgagggggttggggtcagggcctgtcagctcactgggccatgcctagtagatccaccctttcccatctacagatgctcgtacttacccaggttccggggcacgcgcggggcagcccccgccttccagagaacggcggctcctcttgccctcctcagaagaaggctttcgtcgttcccgccgcccaccagcgcctggggcttcttcgatgtctccatcctccaatttcagggcgttctagcagaggcggaccaggatgtaagaaagtggttaacgtgtatgcaggtggggtggggcgctggggactgcgcttctctcttccctctttccaatccgcctcagagcgtaaggcccggcccacctcgtagagcacaagctgcgtgcgcaggtcgacgtcagtgcccgcagtgcccaggtggcgctggaccagcgcttccatgccctgctgctccagtgcatccgtcacatcgtagaaggagtcctggtccgggagcgccgccagcgtctggagggcggggataagaaggcaaggctgaggttggtggggaggtcaggagcctgagcatcccagagctggcacccagtccttggccacaccttgttgatgagggtgaccgtgtacaccaacaactcagggtcagcgccattcttctcctccaggatggacaccagattggcccagggaggagcacctgccacacagaaagtggagcagtcatgggggaacaggtaggagagagggctctgagcggtggggggagaaagggacagtctctgaccggtggtgctggccacagagttcactgcacggatgaacagcggtgcgttgttttcggagtattctacaaacaccaacagcagcttcagggctgtcttcaccaccaagcgggactgaggagagaggtcagtacatatgagtggggcttaggccagacctgtgccagctgttgctggggaaggggaagggctgctggggctggacccagagagaatctaggcagaatgaccctggccccaggcccaggcactgaagtgccttataggcttacagaggcctcagactcactcccttccagctcactttgcagaacaggaaactgaggcccagagagaagcaacaggcaaagggtataaggctgagtggagagccacttaccaggctggcacacaatgtgtacagccactgaatagtgtcactgtgggccaccacccccagcattccatccacaaagagcatcagctggccgagcgctggggaaacagggatgggcagagtcagcgagggtcgctggagcagaggtcatgggagaggggcggggctgacctctaaggatgtagctctggtagttgtggtcggcagcagcacccacacggatcaggcagctcagcccctctgaatgcacaaattcaggcaccaggtctttgtcctcctaga

SEQ ID NO: 1623 - DNA, 3357 bp, Homo sapiens
ccggggtcccagttctaaagtccccacgcacccacccggactcagaatctcctcagacgccgagatgcgggtcacggcgccccgaaccctcctcctgctgctctggggggcagtggccctgaccgagacctgggccggtgagtgcggggtcgggagggaaatggcctctgtggggaggagagaggggaccgcaggcgggggcgcaggacccggggagccgcgccgggaggagggtcgggcgggtctcagcccctcctcgcccccaggctcccactccatgaggtatttctacaccgccatgtcccggcccggccgcggggagccccgcttcatcaccgtgggctacgtggacgacacgctgttcgtgaggttcgacagcgacgccacgagtccgaggaaggagccgcgggcgccatggatagagcaggaggggccggagtattgggaccgggagacacagatctccaagaccaacacacagacttaccgagagaacctgcgcaccgcgctccgctactacaaccagagcgaggccggtgagtgaccccggcccggggcgcaggtcacgactccccatcccccacgtacggcccgggtcgccccgagtctccgggtccgagatccgcccccgaggccgcgggacccgcccagaccctcgaccggcgagagccccaggcgcgtttacccggtttcattttcagttgaggccaaaatccccgcgggttggtcggggcggggcggggctcgggggacggggctgaccgcggggccggggccagggtctcacatcatccagaggatgtacggctgcgacgtggggccggacgggcgcctcctccgcgggtatgaccaggacgcctacgacggcaaggattacatcgccctgaacgaggacctgagctcctggaccgcggcggacaccgcggctcagatcacccagcgcaagtgggaggcggcccgtgtggcggagcagctgagagcctacctggagggcctgtgcgtggagtcgctccgcagatacctggagaacgggaaggagacgctgcagcgcgcgggtaccaggggcagtggggagccttccccatctcctataggtcgccggggatggcctcccacgagaagaggaggaaaatgggatcagcgctagaatgtcgccctcccttgaatggagaatggcatgagttttcctgagtttcctctgagggccccctcttctctctaggacaattaagggatgacgtctctgaggaaatggaggggaagacagtccctagaatactgatcaggggtcccctttgacccctgcagcagccttgggaaccgtgacttttcctctcaggccttgttctctgcctcacactcagtgtgtttggggctctgattccagcacttctgagtcactttacctccactcagatcaggagcagaagtccctgttccccgctcagagactcgaactttccaatgaataggagattatcccaggtgcctgcgtccaggctggtgtctgggttctgtgccccttccccaccccaggtgtcctgtccattctcaggctggtcacatgggtggtcctagggtgtcccatgagagatgcaaagcgcctgaattttctgactcttcccatcagaccccccaaagacacatgtgacccaccaccccatctctgaccatgaggtcaccctgaggtgctgggccctgggcttctaccctgcggagatcacactgacctggcagcgggatggcgaggaccaaactcaggacaccgagcttgtggagaccagaccagcaggagatagaaccttccagaagtgggcagctgtggtggtgccttctggagaagagcagagatacacatgccatgtacagcatgaggggctgccgaagcccctcaccctgagatggggtaaggagggggatgaggggtcatatctcttctcagggaaagcaggagcccttcagcagggtcagggcccctcatcttcccttcctttcccagagccgtcttcccagtccaccgtccccatcgtgggcattgttgctggcctggctgtcctagcagttgtggtcatcggagctgtggtcgctgctgtgatgtgtaggaggaagagctcaggtagggaaggggtgaggggtggggtctgggttttcttgtcccactgggggtttcaagccccaggtagaagtgttccctgcctcattactgggaagcagcatccacacaggggctaacgcagcctgggaccctgtgtgccagcacttactcttttgtgcagcacatgtgacaatgaaggacggatgtatcaccttggtggttgtggtgttggggtcctgattccagcattcatgagtcaggggaaggtccctgctaaggacagaccttaggagggcagttggtccaggacccacacttgctttcctcgtgtttcctgatcctgccttgggtctgtagtcatacttctggaaattccttttgggtccaagacgaggaggttcctctaagatctcatggccctgcttcctcccagtcccctcacagggcattttcttcccacaggtggaaaaggagggagctactctcaggctgcgtgtaagtgatgggggcgggagtgtggaggagctcacccaccccataattcctcctgtcccacgtctcctgcgggctctgaccaggtcctgtttttgttctactccaggcagcgacagtgcccagggctctgatgtgtctctcacagcttgaaaaggtgagattcttggggtctagagtgggtggggtggcaggtctgggggtgggtggggcagtggggaaaggcctgggtaatggagattctttgattgggatgtttcgcgtgtgtggtgggctgtttagagtgtcatcacttaccatgactaaccagaatttgttcatgactgttgttttctgtagcctgagacagctgtcttgtgagggactgagatgcaggatttcttcacgcctcccctttgtgacttcaagagcctctggcatctctttctgcaaaggcacctgaatgtgtctgcgtccctgttagcataatgtgaggaggtggagagacagcccacccccgtgtccaccgtgacccctgttcccatgctgacttgtgtttcctccccagtcatctttcctgttccagagaggtggggctggatgtctccatctctgtctcaactttatgtgcactgagctgcaacttcttacttccctactgaaaataagaatctgaatataaatttgttttctcaaatatttgctatgagaggttgatggattaattaaataagtcaattcctggaatttgagagagcaaataaagacctgagaaccttccagaatctgca

SEQ ID NO: 1624 - DNA, 3357 bp, Homo sapiens
ccgcggtcccagttctaaagtccccacgcacccacccggactcagagtctcctcagacgccgagatgctggtcatggcgccccgaaccgtcctcctgctgctctcggcggccctggccctgaccgagacctgggccggtgagtgcgggtcgggagggaaatggcctctgccgggaggagcgaggggaccgcaggcgggggcgcaggacctgaggagccgcgccgggaggagggtcgggcgggtctcagcccctcctcacccccaggctcccactccatgaggtatttctacacctccgtgtcccggcccggccgcggggagccccgcttcatctcagtgggctacgtggacgacacccagttcgtgaggttcgacagcgacgccgcgagtccgagagaggagccgcgggcgccgtggatagagcaggaggggccggagtattgggaccggaacacacagatctacaaggcccaggcacagactgaccgagagagcctgcggaacctgcgcggctactacaaccagagcgaggccggtgagtgaccccggcccggggcgcaggtcacgactccccatcccccacgtacggcccgggtcgccccgagtctccgggtccgagatccgcctccctgaggccgcgggacccgcccagaccctcgaccggcgagagccccaggcgcgtttacccggtttcattttcagttgaggccaaaatccccgcgggttggtcggggcggggcggggctcgggggactgggctgaccgcggggccggggccagggtctcacaccctccagagcatgtacggctgcgacgtggggccggacgggcgcctcctccgcgggcatgaccagtacgcctacgacggcaaggattacatcgccctgaacgaggacctgcgctcctggaccgccgcggacacggcggctcagatcacccagcgcaagtgggaggcggcccgtgaggcggagcagcggagagcctacctggagggcgagtgcgtggagtggctccgcagatacctggagaacgggaaggacaagctggagcgcgctggtaccaggggcagtggggagccttccccatctcctataggtcgccggggatggcctcccacgagaagaggaggaaaatgggatcagcgctagaatgtcgccctccgttgaatggagaatggcatgagttttcctgagtttcctctgagggccccctcttctctctagacaattaaggaatgacgtctctgaggaaatggaggggaagacagtccctagaatactgatcaggggtcccctttgacccctgcagcagccttgggaaccgtgacttttcctctcaggccttgttctctgcctcacactcagtgtgtttggggctctgattccagcacttctgagtcactttacctccactcagatcaggagcagaagtccctgttccccgctcagagactcgaactttccaatgaataggagattatcccaggtgcctgcgtccaggctggtgtctgggttctgtgccccttccccaccccaggtgtcctgtccattctcaggctggtcacatgggtggtcctagggtgtcccatgaaagatgcaaagcgcctgaattttctgactcttcccatcagaccccccaaagacacacgtgacccaccaccccatctctgaccatgaggccaccctgaggtgctgggccctgggtttctaccctgcggagatcacactgacctggcagcgggatggcgaggaccaaactcaggacactgagcttgtggagaccagaccagcaggagatagaaccttccagaagtgggcagctgtggtggtgccttctggagaagagcagagatacacatgccatgtacagcatgaggggctgccgaagcccctcaccctgagatggggtaaggagggggatgaggggtcatatctcttctcagggaaagcaggagcccttcagcagggtcagggcccctcatcttcccctcctttcccagagccgtcttcccagtccaccgtccccatcgtgggcattgttgctggcctggctgtcctagcagttgtggtcatcggagctgtggtcgctgctgtgatgtgtaggaggaagagttcaggtagggaaggggtgaggggtggggtctgggttttcttgtcccactgggggtttcaagccccaggtagaagtgttccctgcctcattactgggaagcagcatgcacacaggggctaacgcagcctgggaccctgtgtgccagcacttactcttttgtgcagcacatgtgacaatgaaggatggatgtatcaccttgatggttgtggtgttggggtcctgattccagcattcatgagtcaggggaaggtccctgctaaggacagaccttaggagggcagttggtccaggacccacacttgctttcctcgtgtttcctgatcctgccctgggtctgtagtcatacttctggaaattccttttgggtccaagactaggaggttcctctaagatctcatggccctgcttcctcccagtgccctcacaggacattttcttcccacaggtggaaaaggagggagctactctcaggctgcgtgtaagtggtgggggtgggagtgtggaggagctcacccaccccataattcctcctgtcccacgtctcctgcgggctctgaccaggtcctgtttttgttctactccaggcagcgacagtgcccagggctctgatgtgtctctcacagcttgaaaaggtgagattcttggggtctagagtgggtggggtggcgggtctgggggtgggtggggcagaggggaaaggcctgggtaatggggattctttgattgggatgtttcgcgtgtgtggtgggctgtttagagtgtcatcgcttaccatgactaaccagaatttgttcatgactgttgttttctgtagcctgagacagctgtcttgtgagggactgagatgcaggatttcttcacgcctcccctttgtgacttcaagagcctctggcatctctttctgcaaaggcacctgaatgtgtctgcgtccctgttagcataatgtgaggaggtggagagacagcccacccttgtgtccactgtgacccctgttcccatgctgacctgtgtttcctccccagtcatctttcttgttccagagaggtggggctggatgtctccatctctgtctcaactttacgtgcactgagctgcaacttcttacttccctactgaaaataagaatctgaatataaatttgttttctcaaatatttgctatgagaggttgatggattaattaaataagtcaattcctggaatttgagagagcaaataaagacctgagaaccttccagaatctgca

SEQ ID NO: 1625 - DNA, 1098 bp, Homo sapiens
ctgatcctgcgccatgatcctggatggctgcgccccacttatgagcccattggattgggtggtgctcggggcaccaagagagggtgccccacacaccacgtgtattgtggtatacaagagggcatcgagcccctcagtgggagatattttgccaactgccatgtggaagaggtgcctccagctgcccgaaacgaccgggcagcccatcggctatgggaggccagcaagaggctggcagggcttgggcctggggagtatgctgaacccgatgaagacccccagtctgaggactcagaggccccatcttgtctaagcaccccccaccctgaggagcccacagtttctcaaccttaccccagccctcagagctcaccagatttgtctaagatgacgcaccgaattcaggctaaagttgagcctgagatccagctctcctaaccctcaggccaggatgcttgccatggcacttcatggtccttgaaaacctcggatgtgtgcgaggccatgccctggacactgacgggtttgtgatcttgacctccgtggttactttctggggccccaagctgtgccctggacatctcttttcctggttgaaggaataatgggtgattatttcttcctgagagtgacagtaaccccagatggagagataggggtatgctagacactgtgcttctcggaaatttggatgtagtattttcaggccccacccttattgattctgatcagctctggagcagaggcagggagtttgcaatgtgatgcactgccaacattgagaattagtgaactgatccctttgcaaccgtctagctaggtagttaaattacccccatgttaatgaagcggaattaggctcccgagctaagggactcgcctagggtctcacagtgagtaggaggagggcctgggatctgaacccaagggtctgaggccagggccgactgccgtaagatgggtgctgagaagtgagtcagggcagggcagctggtatcgaggtgccccatgggagtaaggggacgccttccgggcggatgcagggctggggtcatctgtatctgaagcccctcggaataaagcgcgttgaccgccgaa

SEQ ID NO: 1626 - DNA, 255 bp, Homo sapiens
gggtcgcgcagccctggagggcaggtgcctgtatggggaggggccctgaaacagaggtcgtttctcggcacagtcagacccgttaattccaagcaggctggggcttgttggggattaccggcactgcccgcccaggagacgcggatgcggcctctacaggttgggaaacccggttctgggcagtgcagtttgggattgcaaaatgctgcaagttccagaatttctatctaggtggggcatggggactgcggtact

SEQ ID NO: 1627 - DNA, 984 bp, Homo sapiens
cctctctgcccccatttccactcctgctcttgggacacaggagactggttagatgagagtagaaagtttatttttgaacacccaggtgtggggtggctgggcgagaccatctgatggctttgggagccaggccgcagggtttagcttggatctgttgagtaggagacccttaaacatggccaccctgagctaagagctggtcttggattttgctttcttttggattaaccgagtattttgtgggattccatttgatcccttaactggctgaccagctataactcctggttatgttgttttagtgttgctccaggtgtcgttggaggagaagttgaaggtacaaggagtttgcaggagggaaggtggcagttaatgagccttcctggtgggaccggatggtgagggcaggggcatctggcccagcgtggactcgggccatagatgggaagtggtcatttggaggtcaccatctctctgacaccctgaccatagcacctgcacccctgtgctgagctgcaggtccccggcaccagcgtctgtgcagctcaggtgttgctgagccgtggcctccgcagctctccatcaggatttctcaagcttcattatgaattatctctgtgtgagctcacaacggtgactgcagagtcccaggtcatctctcagatcttctgaatcaaacatatggtctgcagttgccgcgcatgtctttggccgattttctgacaatcaaagtgaagaagttctgagctacgggaagttgggttgaaggcatgatggggaaaacatgattagttgacagcttttcccagagagtttttagacaaactcaaccttggtaaccttctcagtgggcttatgataagaaccttcaatgtgccaaaaaataaaaaaagcagcactccaggtagttaatctttgtttaaaaaacccttccccccacccagtcctgcaaacaaacaaacaaacaaaaaaaggagaaaaaaa

SEQ ID NO: 1628 - DNA, 984 bp, Homo sapiens; identical to SEQ ID NO: 1627

SEQ ID NO: 1629 - DNA, 9545 bp, Homo sapiens
aggtagaagagagaccagaaaaagattttactgagaaggtaaggaatcgttcataaacctagagggtcccaaaagttgtggatgaaattgataagaaaatatgttgcttggttttttttaataaggatgttccccagcgagggaactggactagaaagcggcccacctaacctggtatcaccttcccggaggtaggccaccgggagtcctgtccggtgtgcgttagatcctgtagagcagggaggcgtttataatgggccccaccatggagtttagggttaatccagctaatcgcagagcatccaggaggtgcctggaaatgatcccctccttacagtttactataagcccatgaagagtttccaatttggaaatggaattaaagtaacagtcctgtgatgttagatttatatgcagttttggttttgtctgaaatcgcatctgtgttagtccgttctcacactgccataaagaacttccctgagactgggtaatttacaaagaaaagagctttaattgactcacagttccgcatggctggggagacctcaggaaacttacaatcatggtgaaaagggaagcaggcaccttcttcacaaggcgacaggagagagaacatgtgaaggaggaactgtcaaacacaaagccatcagatctcctgggagcccactcactatcacgagaacagcatgggggaaactgcccccgtgatccagtctcctcccaccagggccgtccctcatcttgtggggattatggggattacaattccagatgagatttgggtggggacacagagctaaaccatatcagcatgtgatcctctcaacgttccaggggtctcgtaacatgccgggcctgtctgcagccacgctggcctctctgggtgggacttcctctcggagaggcagcggagacacctccatctccatcgacaccgaggcatccatcagggaaatcaaggtgagatgctctcttcttactgacaacttgagagaaccttttgtaaaaatcagtctttagattaaaaaaaaaaaagttaattcataaagttctggatctttcttcttggtcctctctccctcacctcccctaaaatacggtgttctcctaacatcaagacccagctcagatagtgtctcctgcaggaatctgatcctacccactgaccccccagcagggcggaccgtgtgccggccccctgcgcccctcagcacccggggaataccttagtgagagcacttggcacgttgtgttgatgcacttggtcgtctctgtatgcttggtctgcatagacattcagtccacaagtttggacaccagacggctttacctactttcacacaacccctccccactaagtatgttccccttcggcctagaacttgccctttcctttctctttgtaatgtgcctttagtagccctcatctttgtattttaatgattttttttatcccactgtagtgtaggtattattctctgctctatcctcagcacccaggacagtgccaggcatttggtagtattctgtgtgtgaaagagaaacacggtgctatttgttaaagtaactagggacagtgcatctgaaaacctgaagactggaagggcaggtgaggtgactagacctgtgtcctccagggagcagaaccaagacagaagcagctggaaggagccagaactgactcagattctgaattttctagtgctttaaactaggtttaaaagggaagcaacttccactggggatgtctgagcagctggatggccgtttgccagggaggacggagagggatttaagcatccaccagagtttggccagggttaccttgaagatgcttccaacacctatgttttataagtttacaaaaccagaagagccatttcccatgtgccacccctgggccacctgcagctccttgttgcttccctttttttttcctttttcttttcttttctttctttctttttttttttttttttttttttttggagacaagagttttgcttttgtcacccatgctggagttcaatggcacgatctcggctcactgcaacctccacctcccaggttcaagtgattctccagcctcagcctcctgagtagctgggattacaggcgcccgccaccatgcccggctaacttttgtatttttagtggagacggggtttcgccatgttggccaggctggtcttgaactcctgacctcaggtgatccacccactcggcctcccaaagtgctgggattccaggcgtgagccgctgcgcctggcctgttgtttccgtttctacagcagagcagcagagttggcggcagtcctgatgtttctctgcccttaggttgcgcgtgccgttcatttgttcaggtacttactgagaggctggctggtgccagatgctgtccccggcaccaggaatttggcaaagtagagacttggagctccataaatgcagggaaaaagtgctactgatttttgcctctagcatcttactgtacattgcacagagtaggaactcctagtgcttgaatgaattactaaataggagttgaaataacctgtaccgttttccgaggctctattttgtctgttttttaaactgtgtaaaatcatatgagatacactaaaattgtataaaatcatgtaaaaatatcatatgggatacacctgaactttaatctttaaatattgaagtttattttcccttaacgcttaataaaataaaaaagaaaattgggtgctcagactacccaaatagaaactaccctgaagtataaaagatttagggaatcacctgttttcccttgacatcatctgccttttttgccatttcccccaggaactcaatgagttaaaggaccagattcaggatgtagaaggcaaatacatgcagggattgaaagagatgaaggtaccaattcacagacgtgtggtctcacgatattaacccaacttaacttaaaaaaaaaaacaacatcctaaagaagaaattcaaagtgcatgcttactgtaaataggctccagggtgtagaagaactcacaatggcaggagtgccggcatgggtgtacactcaccattttcccaaatgcattgtttgaaccaagattgaaaatgtaactgcccagtagaaaaggttactaacatactccctgatgcatgccttagacttaccatccttcccccaggcttaaaaccagtttctcatttcccataggcgtgtgccagacacttgaagaaggttcttggttttcttcactttttgtagtagttgtatacaaaaatgcttcagttgatttgcttctcaaaatatctgatgtctactaataaggccgtcctcacatgccacacttttgaaacatcccaattatttgcaccctgtaaaatgctactaattgaagtaaagactgactatggcattggctttcttggagcgtgtgcacactgcttttagagtgtgcagtgacttcattgcaccagccaggagatgtggttgccctgttccttgacagtaaggtgggcaatcagtgactgtcttccttaggcagcagcggatcatggatctggaagtgggtggcgtatctgttacttccttttcagccccctagaaagtacctgcaagatcatttgaatttaatatcaaagggcaccagacagaggaggtgacatcgatcatgactaattcactatcttcatatctgccacctttcctgaaagggggaaaaataagactctggctttcaattcatgcgaaaaggagccacttggccaggcgtggtggctcacgcctgtaattccacactttgggaggccgaggtgggtggatcaccggaggtcaggagtttgagaccagcctggccaacatggtgagaccccgtctctactaaaaatataaaaattagccaggtgtggtggtgcgcacctgtaatcccagctacttgggaggctgagtcaggagaatcacttgaacccggcaggtggaggctgcagtgagccgagatcgtgccactgcactccagcctgggtgacagagcgagacactgtttcaaaaaagaaaaaatgctgctggggagccactgaaccaaccggagacccgctggtcccacgtgaagcagctgtcctggtgtggaggtacagagctagaccagcactggtccctccagccccctggtagcctctgctgcacctgaactggcagctcttgccgctgcctttagctctgcatgtatgcgccctgaaggttctgcctctctgttttggaatcgccttcccctcctcatgtttggggacctgcaagggtgtgaggcacgtgagggcatcgccatgcgtattttacaggcctctttctctggactgtccttcaaagggaatgacctttgtctttccaggacctacccagtgagatctgcctgccattttcctatgagtcaaaaatctgaactcactactgctcctttcctggttcataagccagagtagggctggttggcagtcactggcttgtggccctatgtaattatctcagccatcacacactggctctttcacaagggctggtcacacgcctcgagtgattcttcagaaatctgttgaacagcctgacacccagccctaggacgccgtgctggggggattccccagctactgagtggggccagagactctactgcctctgtgaccacatccctttccatactggtatctcgtttgttctaatgagtgtgtccattgcttttaatagtgaattttctgagcaatgagaatttgaccaaattgaaaagggggatttccatgcatttgaaattgccatgtgtttcttcttctgatccatttgctctaagaaatatagtctaagtttaggactgagggtttttttttaacagaatactgaatgattctttgttttgatttttttattgcaatttcaaaaatatgacctgctttccacaggactctctagcagaagttgaagagaaatataagaaggctatggtttccaatgctcagctagacaatgaaaagacaaacttcatgtaccaggttgataccctaaaagatatgttgctggagcttgaagaacagctggctgaatctaggcggcagtacgaagagaaaaacaaagtaagcattagtatgatacagaatgttaacaataggctgcgtgcagtggcccatgcctgtaattctggtactttgggaggccaaggtgggaggattacttgagcccaagagttcgagaccagcctgggcaacatggcgagacatcatttctaaaaagaattaaaacaattagccaggtggtacatggctgtagtcccagctacttgggaagctgaggtgggaggatcacttgagcctggaaggttgaggctgcagtgagctgtgttgacaccactgcactccagcttgggcaacagagaagacactgtctcaaaaaaaaaaaaaaaaaaagggaatggtagggtgtgtgtgtgtgtgtgtgtatgtatgtatgtatgtgtggatatatcgtgtgtatgtatgtatatataatgtataatttacattatgtatttttatatttttaaacaatggctctccgcttatccaggaaatccaaacatctgagaataaaagtaccatactctttgccaagtgacttgaaatattgatacgtataatttcaacatgtaaactggagacagtttttctaggagaacatctaagctaaaagcaaaaccatgaaaaaacatacctatgaaagagccaccatgctcagataaggtgcgatcagatgcttcaagattttcctattcatatgtattttctgatttttattttgttctctctcaacaccatagggaaatagttatgagtatcaaagattttaagaaaattatattattttctgctgattgggaaaagacacagttactctacttaagaattaaatatatcaccaagctcagagagagagatagtcttatctgagctttcattaggaaccactggaactagtttgttaatagctgagatcagatataatttctattgagagtctcaagcatgagtcatgtgttaagataagtaatgacagcggactgattccacgaaggctgggcttggatgttctttagatagaaagcaaggaatacttttttcatacttttaggaattgtccaatttttcagagattctgagaaaaacagaaaatgtaatgtgtgagtgtcgttgttgttgttgtttttaactggctattatcctctaaatccaaagggttaaaaccaaggtacccttgacaaccttcaggcctgcttcttcgactgctatagaattgagttggaagctgaagaacattttacgcacaaagttccttatagctgaactctgcaagaggggagcttttcacaagactgatgtcatgtgggaacggaggagtggagagcacagcccagccccccttcgggtgggggcctgtaatgcatatgcattcctcctggaatgctgtcattaggcatcattcagtggactgaaaactcccgagtctcactccagagaagctggatggtgctagaatgctgtcccgagatggacacaggggccatgcaaagccccacaggagggcccttgtcatagccaggagggcaccagccacccccaagctaaaggaagtgggcgaacagaagtgccagggtgagcagaagctcaggccagatcccatctcagatcacccgcctgacaggtctagggaaggagcgtcctgcaggcctgtaagctgtcagcaaagtgagttgggtctcaggccgtcaccagggattgcgctgctgtgactgggcaggaacacagcagagccgagctgccagcttcctgggctgagcctcaggtggggaggccaggcctgaggagcagctaggttttgcaggctctccatttgctcccccaaactctcctgtttttgtctcttaaggggcagccctgaagcacagagctggccaccagctgttcatgagagatgctttagtaggccatgtttatctcctttttatcccaaagagttttccttgtcatatttcagcaggggccattttatggtaagtccttgcagggcagcctcacccaggctctcagcacagtgctgtggaagacaccaggctccctgggggggcccttcgtcggctcttgcttcactgtagataagaaatcagaaaatccttgttgattgcatcaactcctcaggttaatttgacagtaagtcatcaggcatcatctataaagtccagaggaatctgtttgtgttgtttgaaagggcttgaaggccaggtgcagtggctcatgcctgtaatcccaacactttgggaggctggggcaggtggatcgcttgaggtcaagagtttgagaccagtttggccaacatggtgaaacccgatctctaccaaaaatagaaaaattagccgggcatggaggcaggcgcctgtattcccagctacttgggaggctgaggcagcagaatcgcttgaacccaggaggcagaggttgcagtgagctgagatcgcaccactgtactccagcctggacaacagagcaagactccatctcaaaaaaatatataaataaaaaataaaataaaagaccttgaagattgtgatgatgtagtagcaggtgatttgttccacagaaactataaatcgtgagagcctgaactggcatgccagaaacatgggattccactgctttagtgctgtttttctcctttacaggaatttgaaagggaaaaacacgcccacagtatactgcaatttcagtttgctgaagtcaaggaggccctgaagcaaagagaggaaatgctcgaggtaggtagcattctcctgcttttcttttccttttttccctttggagcattttgtcaggccatgactatcttagcttaggctgcagtaataaaataccatacacagcatggcttaaacaacagaaattaattttcttacaattctggaggctgggagtccaagatcaaggttgggttcaggtgaggcctctcttcctggcctgcagacagccaccttcttgctatatccttcctccaacggtggagaaaaagcaatgtctctgatgtctcttcatataaggacactaatcctatttgatcaggaccccactcttatgacctcatttaaccttaattacttcgtaaaaaccctatctccaaatacagtcacattgggcattagggcttcaacagatgaatttagagggacacaattcattccatggcaattactaaagttttcagttttcttaaatctgagagtttaggctaactctccatccctagatttacgaaacagtccctctcattggtgaacattcctattctttggtgatcttgtatttgtttggggaggtgtggtagacagaataatggtcccccgaagttgcctacatccagatccctggaaactgtaaatatgatgccttacatggttaaagggcccctgcagttgtgatgagagaccttgagagaagggattatcctggattatttgatggaacaagcatccttctaagaggaaggcaactcaaaggcagaagtagaagatgtgacacaggaagctgaggttggagcgatgcgagagaggggccatgagccaaggaaagcagctcagtcttagaagctgaaaaaggcagggaaacagattctccctagagccttccagaaaggcttgattttagcccataagactcattttggacttctgacctctagaattgcaagagaataaatttgtgttttaagctgctgaatttatgacgattcattacaatggcaataagaaactaatacagggttggtttttaattttttgacttaatcggttctttaactgctgccttgaagtgagaatttcacccaaagcaggttttcttcctgcacttcttgaagccggaagtaggacaaggaaaaaaatcctagaatgctgacaatgagttcagggttgatgaggtgaaagagtgcttgcggcctcactcactgtcccagctctcaggttctctctcgggctggggtttttcttcctctttaaccctttatctgctttctgtctgttcctttcctcaggaaatccgacagctacagcagaaacaggcgagttctatcagggagatttctgatcttcaggaaacaatagagtggaaagacaaaaagataggggtaggattcccaagtcttgaaaatctactcaaatgggcagcctgcttagcaaatagagttttttcagagtctttagtttgcaaaaccgcttgtctgagtatgcatgcaactcccacgtgacacaaagtcgtattaatttatttaattttattaagtagtgaatacactaacttatccaaattgatatgaacttggattgtgacacggactctccatggagggtcttgtgaatgcgtagctgtgcgctctgcctgccccgtggctgggccgggccggtggttgttgaaacagctggagtgaggaggacactctgaggaggtctgatgtgtgcaagtccagacgtcttgggattatctgc

SEQ ID NO: 1630 - DNA, 7809 bp, Homo sapiens
aggtagaagagagaccagaaaaagattttactgagaaggtaaggaatcgttcataaacctagagggtcccaaaagttgtggatgaaattgataagaaaatatgttgcttggttttttttaataaggatgttccccagcgagggaactggactagaaagcggcccacctaacctggtatcaccttcccggaggtaggccaccgggagtcctgtccggtgtgcgttagatcctgtagagcagggaggcgtttataatgggccccaccatggagtttagggttaatccagctaatcgcagagcatccaggaggtgcctggaaatgatcccctccttacagtttactataagcccatgaagagtttccaatttggaaatggaattaaagtaacagtcctgtgatgttagatttatatgcagttttggttttgtctgaaatcgcatctgtgttagtccgttctcacactgccataaagaacttccctgagactgggtaatttacaaagaaaagagctttaattgactcacagttccgcatggctggggagacctcaggaaacttacaatcatggtgaaaagggaagcaggcaccttcttcacaaggcgacaggagagagaacatgtgaaggaggaactgtcaaacacaaagccatcagatctcctgggagcccactcactatcacgagaacagcatgggggaaactgcccccgtgatccagtctcctcccaccagggccgtccctcatcttgtggggattatggggattacaattccagatgagatttgggtggggacacagagctaaaccatatcagcatgtgatcctctcaacgttccaggggtctcgtaacatgccgggcctgtctgcagccacgctggcctctctgggtgggacttcctctcggagaggcagcggagacacctccatctccatcgacaccgaggcatccatcagggaaatcaaggtgagatgctctcttcttactgacaacttgagagaaccttttgtaaaaatcagtctttagattaaaaaaaaaaaagttaattcataaagttctggatctttcttcttggtcctctctccctcacctcccctaaaatacggtgttctcctaacatcaagacccagctcagatagtgtctcctgcaggaatctgatcctacccactgaccccccagcagggcggaccgtgtgccggccccctgcgcccctcagcacccggggaataccttagtgagagcacttggcacgttgtgttgatgcacttggtcgtctctgtatgcttggtctgcatagacattcagtccacaagtttggacaccagacggctttacctactttcacacaacccctccccactaagtatgttccccttcggcctagaacttgccctttcctttctctttgtaatgtgcctttagtagccctcatctttgtattttaatgattttttttatcccactgtagtgtaggtattattctctgctctatcctcagcacccaggacagtgccaggcatttggtagtattctgtgtgtgaaagagaaacacggtgctatttgttaaagtaactagggacagtgcatctgaaaacctgaagactggaagggcaggtgaggtgactagacctgtgtcctccagggagcagaaccaagacagaagcagctgaaaggagccagaactgactcagattctgaattttctagtgctttaaactaggtttaaaagggaagcaacttccactggggatgtctgagcagctggatggccgtttgccagggaggacggagagggatttaagcatccaccagagtttggccagggttaccttgaagatgcttccaacacctatgttttataagtttacaaaaccagaagagccatttcccatgtgccacccctgggccacctgcagctccttgttgcttccctttttttttcctttttcttttcttttctttctttctttttttttttttttttttttttttggagacaaaagttttgcttttgtcacccatgctggagttcaatggcacgatctcggctcactgcaacctccacctcccaggttcaagtgattctccagcctcagcctcctgagtagctgggattacaggcgcccgccaccatgcccggttaacttttgtatttttagtggagacggggtttcgccatgttggccaggctggtcttgaactcctgacctcaggtgatccacccactcggcctcccaaagtgctgggattccaggcgtgagccgctgcgcctggcctgttgtttccgtttctacagcagaacaccaaagttggcggcagtcctgatgtttctctgcccttaggttgcgcgtgccgttcatttgttcaggtacttactgagaggctggctggtgccagatgctgtccccggcaccaggaatttggcaaagtagagacttggagctccataaatgcagggaaaaagtgctactgatttttgcctctagcatcttactgtacattgcacagagtaggaactcctagtgcttgaatgaattactaaataggagttgaaataacctgtaccgttttccgaggctctattttgtctgttttttaaactgtgtaaaatcatatgagatacactaaaattgtataaaatcatgtaaaaatatcatatgggatacacctgaactttaatctttaaatattgaagtttattttcccttaacgcttaataaaataaaaaagaaaattgggtgctcagactacccaaatagaaactaccctgaagtataaaagatttagggaatcacctgttttcccttgacatcatctgccttttttgccatttcccccaggaactcaatgagttaaaggaccagattcaggatgtagaaggcaaatacatgcagggattgaaagagatgaaggtaccaattcacagacgtgtggtctcacgatattaacccaacttaacttaaaaaaaaaaacaacatcctaaagaagaaattcaaagtgcatgcttactgtaaataggctccagggtgtagaagaactcacaatggcaggagtgccggcatgggtgtacactcaccattttcccaaatgcattgtttgaaccaagattgaaaatgtaactgcccagtagaaaaggttactaacatactccctgatgcatgccttagacttaccatccttcccccaggcttaaaaccagtttctcatttcccataggcgtgtgccagacacttgaagaaggttcttggttttcttcactttttgtagtagttgtatacaaaaatgcttcagttgatttgcttctcaaaatatctgatgtctactaataaggccgtcctcacatgccacacttttgaaacatcccaattatttgcaccctgtaaaatgctactaattgaagtaaagactgactatggcattggctttcttggagcgtgtgcacactgcttttagagtgtgcagtgacttcattgcaccagccaggagatgtggttgccctgttccttgacagtaaggtgggcaatcagtgactgtcttccttaggcagcagcggatcatggatctggaagtgggtggcgtatctgttacttccttttcagccccctagaaagtacctgcaagatcatttgaatttaatatcaaagggcaccagacagaggaggtgacatcgatcatgactaattcactatcttcatatctgccacctttcctgaaagggggaaaaataagactctggctttcaattcatgcgaaaaggagccacttggccaggcgtggtggctcacgcctgtaattccacactttgggaggccgaggtgggtggatcaccggaggtcaggagtttgagaccagcctggccaacatggtgagaccccgtctctactaaaaatataaaaattagccaggtgtggtggtgcgcacctgtaatcccagctacttgggaggctgagtcaggagaatcacttgaacctggcaggtggaggctgcagtgagccgagatcgtgccactgcactccagcctgggtgacagagcgagacactgtttcaaaaaagaaaaaatgctgctggggagccactgaaccaaccggagacccgctggtcccacgtgaagcagctgtcctggtgtggaggtacagagctagaccagcactggtccctccagccccctggtagcctctgctgcacctgaactggcagctcttgccgctgcctttagctctgcatgtatgcgccctgaaggttctgcctctctgttttggaatcgccttcccctcctcatgtttggggacctgcaagggtgtgaggcacgtgagggcatcgccatgcgtattttacaggcctctttctctggactgtccttcaaagggaatgacctttgtctttccaggacctacccagtgagatctgcctgccattttcctatgagtcaaaaatctgaactcactactgctcctttcctggttcataagccagagtagggctggttggcagtcactggcttgtggccctatgtaattatctcagccatcacacactggctctttcacaagggctggtcacacgcctcgagtgattcttcagaaatctgttgaacagcctgacacccagccctaggacgccgtgctggggggattccccagctactgagtggggccagagactctactgcctctgtgaccacatccctttccatactggtatctcgtttgttctaatgagtgtgtccattgcttttaatagtgaattttctgagcaatgagaatttgaccaaattgaaaagggggatttccatgcatttgaaattgccatgtgtttcttcttctgatccatttgctctaagaaatatagtctaagtttaggactgagggtttttttttaacagaatactgaatgattctttgttttgatttttttattgcaatttcaaaaatatgacctgctttccacaggactctctagcagaagttgaagagaaatataagaaggctatggtttccaatgctcagctagacaatgaaaagacaaacttcatgtaccaggttgataccctaaaagatatgttgctggagcttgaagaacagctggctgaatctaggcggcagtacgaagagaaaaacaaagtaagcattagtatgatacagaatgttaacaataggctgcgtgcagtggcccatgcctgtaattctggtactttgggaggccaaggtgggaggattacttgagcccaagagttcgagaccagcctgggcaacatggcgagacatcatttctaaaaagaattaaaacaattagccaggtggtacatggctgtagtcccagctacttgggaagctgaggtgggaggatcacttgagcctggaaggttgaggctgcagtgagctgtgttgacaccactgcactccagcttgggcaacagagaagacactgtctcaaaaaaaaaaaaaaaaaaagggaatgctacggtgtgtgtgtgtgtgtgtgtatgtatgtatgtatgtgtggatatatcgtgtgtatgtatgtatatataatgtataatttacattatgtatttttatatttttaaacaatggctctccgcttatccaggaaatccaaactctgagaataaaagtaccatactctttgccaagtgacttgaaatattgatacgtataatttcaacatgtaaactgaagacagttttctaggagaacatctaagctaaaagcaaaaccatgaaaaaacatacctataaagagccaccatgctcagataaggtgcgatcagatgcttcaagattttcctattcatatgtattttctgatttttattttgttctctctcaacaccatagggaaatagttatgagtatcaaagattttaagaaaattatattattttctgctgattgggaaaagacacagttactctacttaagaattaaatatatcaccaagctcagagagagagatagtcttatctgagctttcattaggaaccactggaactagtttgttaatagctgagatcagatataatttctattgagagtctcaagcatgagtcatgtgttaagataagtaatgacagcggactgattccacgaaggctgggcttggatgttctttagatagaaagcaaggaatacttttttcatacttttaggaattgtccaatttttcagagattctgagaaaaacagaaaatgtaatgtgtgagtgtcgttgttgttgttgtttttaactggctattatcctctaaatccaaagggttaaaaccaaggtacccttgacaaccttcaggcctgcttcttcgactgctatagaattgagttggaagctgaagaacattttacgcacaaagttccttatagctgaactctgcaagaggggagcttttcacaagactgatgtcatgtgggaacggaggagtggagagcacagcccagccccccttcgggtgggggcctgtaatgcatatgcattcctcctggaatgctgtcattaggcatcattcagtggactgaaaactcccgagtctcactccagagaagctggatggtgctagaatgctgtcccgagatggacacaggggccatgcaaagccccacaggagggcccttgtcatagccaggagggcaccagccacccccaagctaaaggaagtgggcgaacagaagtgccagggtgagcagaagctcaggccagatcccatctcagatcacccgcctgacaggtctagggaaggagcgtcctgcaggcctgtaagctgtcagcaaagtgagttgggtctcaggccgtcaccagggattgcgctgctgtgactgggcaggaacacagcagagccgagctgccagcttcctgggctgagcctcaggtggggaggccaggcctgaggagcagctaggttttgcaggctctccatttgctcccccaaactctcctgtttttgtctcttaaggggcagccctgaagcacagagctggccaccagctgttcatgagagatgctttagtaggccatgtttatctcctttttatcccaaagagttttccttgtcatatttcagcaggggccattttatggtaagtccttgcagggcagcctcacccaggctctcagcacagtgctgtggaagacaccaggctccctgggggggcccttcgtcggctcttgcttcactgtagataagaaatcagaaaatccttgttgattgcatcaactcctcaggttaatttgacagtaagtcatcaggcatcatctataaagtccagaggaatctgtttgtgttgtttgaaagggcttgaaggccaggtgcagtggctcatgcctgtaatcccaacactttgggaggctggggcaggtggatcgcttgaggtcaagagtttgagaccagtttggccaacatggtgaaacccgatctctaccaaaaatagaaaaattagccgggcatggaggcaggcgcctgtattcccagctacttgggaggctgaggcagcagaatcgcttgaacccaggaggcagaggttgcagtgagctgagatcgcaccactgtactccagcctggacaacagagcaagactccatctcaaaaaaatatataaataaaaaataaaataaaagaccttgaagattgtgatgatgtagtagcaggtgatttgttccacagaaactataaatcgtgagagcctgaactggcatgccagaaacatgggattccactgctttagtgctgtttttctcctttacaggaatttgaaagggaaaaacacgcccacagtatactgcaatttcagtttgctgaagtcaaggaggccctgaagcaaagag

SEQ ID NO: 1631 - DNA, 1239 bp, Homo sapiens
gggggagtaattcttagtcccatgttagaaagggggacgtgggacagaacaactgttcacacgtgaaatctagtgattggccaggctccgtgctaggtcttacattatcatttaattccagtactgtcctgagaactaagcattaggagaagcagcatggggctcaacagtgaagtgacttgttccaggcgggtcctcaggagtggctgtgcagccccagtcacttttcatcacaccggagagggacgcacaaccccagtcctgtttagttgcagatataccgagaagggagagcccacaccgaccttaagggcacttgggccctgaatcctatgcctctcgttccactgcttctcagttgccctcctacctggctggccaggtttggagtctctctcccctgctctggcattccagtcttggcctgaagcacgctatgcctctcatacagtctgccttttctagggtccaagcagcatcccaagttctgttgagatgcagcttgcagtccaggaggacaacggtcacccccatcttcccatgtttttcttgctttaagccctcccctaagctttcacatataatcaccaggggttcagaaattgtcagccagttctccttatgctttaagtagattttcttggggccagatgtcttgaaaaacgctctcctgactcagcagttcctggaatttttggcctatcatttatctcactgttctgagtttacttgtaagcctcttcgcttaatgtttgaatcaagatgagcagtaataacagcttcttgtgtaccaattactcagaactcacttaaattgccttaacactttttaaatgttcttacacatttgaaattctttagggagggatttccagaactttcctaaatttctccacccatggcatgacagtacttagaggggcaagaagttcaattttagaataagctcttctgggcgcgatggctcatgcctgtaatcctagcactctgggaggccaaggcgggtagaatgcttgagcccaggagtttgagactagcctgcaatatgcgaaaccctgtctccacaaaaagccagacatagtggtgcatgcctgcagtcccagctacttgggggcgctgagttgtgaggatcacctgagcccaggaggcagaggctatagtgagccatgatcgtgccactgcactccagcctgggtgacagagtgagacgctgtcgtctcaaaaaaaaaaaaaaaaaaa

SEQ ID NO: 1632 - DNA, 2719 bp, Homo sapiens
ctgcccctgtgggccgcacctccaggacctgttcaccggccaccggttctcccggcctgtgcgccagggctccgtggacctgagagcgactgctcacagaccgtgtccccagacaccctgtgctctagtctgtgcagcctggaggatgggttgttgggctccccggcccggctggcctcccagctgctgggcgatgagctgcttctcgccaaactgccccccagccgggaaagtgccttccgcagcctgggcccactggaggcccaggactcactctacaactcgcccctcacagagtcctgcctttcccccgcggaggaggagccagccccctgcaaggactgccagccactctgcccaccactaacgggcagctgggaacggcagcggcaagcctctgacctggcctcttctggggtggtgtccttagatgaggatgaggcagagccagaggaacagtgacccacatcatgcctggcagtggcatgcatcccccggctgctgtcaggggcagagcctctgtgcccaagtgtgggctcaaggctcccagcagagctccacagcctagagggctcctgggagcgctcgcttctccgttgtgttttttgcatgaaagtttttggagaggaggcaggggctgggctgggggcgcatgtcctgcccctatttcccggggcttgccgggggttgcccggggcttttggggcatggctacagctgtggcagacagtgatgttcatgttcttaaaatgccacacacatatttcctcctcggataatgtgaaccatttaagggggttgttactgggctgtgtgagggtggggtgggaggggcccagcaaccccccaccctccccatgcctctctcttctctgcttttcttctcacttccgagtccatgtgcagtgcttgatagaatcacccccacctggaggggctggctcctgccctcccggagcctatgggttgagccgtccctcaagggcccctgcccagctgggctcgtgctgtgcttcattcacctctccatcgtctctaaatcttcctcttttttcctaaagacagaaggtttttggtctgttttttcagtcggatcttctcttctctgggaggctttggaatgatgaaagcatgtaccctccacccttttcctggccccctaatggggcctgggccctttcccaacccctcctaggatgtgcgggcagtgtgctggcgcctcacagccagccgggctgcccattcacgcagagctctctgagcgggaggtggaagaaaggatggctctggttgccacagagctgggacttcatgttcttctagagagggccacaagagggccacaggggtggccgggagttgtcagctgatgcctgctgagaggcaggaattgtgccagtgagtgacagtcatgagggagtgtctcttcttggggaggaaagaaggtagagcctttctgtctgaatgaaaggccaaggctacagtacagggccccaccccagccagggtgttaatgcccacgtagtggaggcctctggcagatcctgcattccaaggtcactggactgtacgtttttatggttgtgggaagggtgggtggctttagaattaagggccttgtaggctttggcaggtaagagggcccaaggtaagaacgagagccaacgggcacaagcattctatatataagtggctcattaggtgtttattttgttctatttaagaatttgttttattaaattaatataaaaatctttgtaaatctctatatacatctggtcattggaggttccagttataaacccatcttagttccacccctttcccctcaaagggggagcaggggtcaagtgaccccaacccatcctgccagggcagggcctatcttcctgcctctggaagacttgttgcaggtgggtagtgggtcagattccaggtaggatgaactgggagaagctggcaccccaggtctggagggggctggggtgcagcctccagctgtagctgcctcctgccttccgaaggcagaaggaatgaaagatgcacattctgggctgacgggcatggctagcaccatcctaggccacccacgaggggctcattggcatttgtcgtcgctgtcggaagggctgccctcccgggggaggccatgacgggagtggggcccccagagtgcatgcacctcagtggtctccgtgtcactgctgctggtggcactgtctcggaagctggcgaggggcggccggactttcacaccctgtgctgtgacagagccctcgatggccttccggagctggaaaggtgagagggacagatgtctggacccagatgtcagactcctccccgccttcctccccaggtgagctggacataagcctccatgactttttggaagtggagcagctttggaggccaccatcacctcacctcctttagagtaacgattccaatgagtctgccaatactggtgacataagcatggtccactcccagcagtgagaagatagtgtgagtctgcagtgtggggagaaaagcgattggacttgatggacgaggggcagctctaaatgacaggccacaggggcccaggacaaggttggtgtggaataggaggggtgccccagattgggagggaaggagacaggactgctggagggaaaataataacaatcgtaataataatgagaatgtttctgtgtccaggcctcaggaacttgat

SEQ ID NO: 1633 - DNA, 224 bp, Homo sapiens
agatcgagaccatcctggctaacatgggaaaccccgtctctactaaaaatacaaaaaattagccgggcgtggtggcgggccgcctgtagtcctagctactccagaggctgaggcaggagaatggtgtgaacccaggaggcggagcttgcagtgagccgaggtcgcgccactgcactccagcctgggcgacagagcaagactccatctcaaaaaaaaaaaaaaaa

SEQ ID NO: 1634 - DNA, 2075 bp, Homo sapiens
agcaaactgaatcagagaaggtgagtggcaaagcccatgtagctggtggcattactagaacttagcactgtgatgcacaaaggcttaactgggtttggcagcaagggtctcatggatactctttaagatgtaggcccagatctcttagtagtgaatccctgatgttccctctcttggggctctggtttagcaaggacagcgaggatactttcctctctccctcctccttactcctctctactaaggattaaggagccacctcttcctccttaaggcctttgggagagatgggtctcctggtattagaaaggagagcagacgcctagagttctgacctcttgggcctcccctaaacaaaaagcatagccccttcactaccctagtaacaagtatgacctgttgcctgttgaggtcaggtgtacctgtgtgtctctctctgtgatgtatgtgggcttggtgtccacatcaatgtgcgtgaatactcctacccacagactgctactgtgccaatatagaggttcataagaaagataaaagagaaccagcagaaccccaggttctgcctctccttcctccctttgcccagataaaggtgtacagtgtttgtggtgaggctgctggacactgctgttttgggctttctagagagaatgcaaacatgcaaaaacagtgtggtagtgtaggcagaacaagatctagaatcagaagacctggagtcgaatctcagctccaacacccactggatgaacgtggacaagctgcttgatctctcagatcctcgatttcttcatctgtaagatggaaacaatatgtgtcttttctaaggggaaagatcaaatgacatcatgtatgtgaaaatgcttagaaatgggtgatgatgatgatgatgatactgattattagggtatctaataaagttggggaaagaacaaaatccccccctcacaccctattgcaccaccagccttctccctccctgctcaattatacccatgttatagggaaggaaatagggaagaaacttgtctaaggtcacatggatgttcgcaacaattgggatgcagaacttgatctgactcccaggccaggtttgattttgatttgcagtggcagagaggactaattttttactaggttctgagccctgtactgaactctggattgccctgtacttggtggtggtatacagttcagcagtttttagcatatacacgaatttgtgcagccataaccactatctaattctagaacatttttatcacccccaaaagaaatcatgtacccatttgcagtcacttgccattccctcttctccccagccctgggaaaccactgacctaccttatatctctatgaatttgcctaatctggacatttcatataaatgcaattgtacatgtggccttttgtttctggcttctttcacttagcatgttttcaaggttcatttgtgctgtagcatttatcagtactttgttcctttttctagctgagtaacgtgtgggtatatcacattttgtttattcatctgttgagggatgtttgggttgtttctactttttgactattgtgattagtgctgctatgaacattgatgtacagatttttgtgtagatatgttttcaattatcttggggcatcttttatttttaatgtcagttttctatttttaaaaaatctagacaggttggcaaatcatttctgtaaagagtcagtaaatattttagcctttgtggtccatgacattaggtatacagattacaatttctgaactctgccattccagtgtgagagcagccatagataatatgtaaacaaatgagcatggctatgttccaataaaacttttaaaaagcaggggacagattgggcctgtggaccatagtataccaacccttaatctaaatgacacattcacatgatacattattctaaaggcacaaaaagcaaaaattctccctcccacctctgtcttccagctacggggttaccttccttgaagcagttaatgttatgagattttgtgtctccttttagacacagttaataatgagcattaaagtggctatatacta

SEQ ID NO: 1635 - DNA, 2075 bp, Homo sapiens; identical to SEQ ID NO: 1634

SEQ ID NO: 1636 - DNA, 478 bp, Homo sapiens
actgggaacagcaggaaagggcaaggtggtgacaatctaagggaggcaaatggataataaccagcatggtagggaatcttctttgttgctgtggcactgtcgatctctgttccctgaactctagtgtcctccagactagatttaaggtgtggttccccgctaaattattctctcacctcctttcagtctttgctcaaacatccttttatcagagaggctttctgacatcctgtgcaagatagcacctctcccccatcgctgttatccttacccagtttaattccacgtagcatctgccaacgcttgacatatttgttttttgtttactttctggcctgtgacaactagaatataagctctgtgagagcatttttctcttaactgcttatcttcaagtaaacagaacagtgcctgtcctgtaggaagtgtttgatacatacagattgctcaaatgaaaaaagaagggtgcgagcaagcc

SEQ ID NO: 1637 - DNA, 1011 bp, Homo sapiens
agtccttgaggaacagaaccctaaaagagagaacacctgcctaatctgactcctccatcagaataatcttttgaactcctgagatttgcccagtcattttggggccatgtctgatgaaagcttggtgatcccttttgggtcaaaaacaagctctgactgaagagatgcaagattttctcagatgatttgtgtgtcagtcagagttccgccagagaaacacaaccagtaggatatattctatcttgtctgtcttcatatccatgtatctgtcatctacctagatttaatgcaaggaattggtttatgcagttgtaggggctggctaggcaaatccaaaatccacagggcaggccgtgtggaagggaggtctggaaactctcagacaagacctgacattgcagtccactggtggaatttctccttcttcagggaaacctcagctttcaacggagtggatcagacccaaccatattatccaggataatctcctttacataaagttaactgattgtagatgtaaattacatttacaagataccttcatagcaacacctaggtcagtttttgaataactgggtattatagcatagccaggtcaacacgtaaaattgatcaccacagtccatgtcttgttaacttggcacctgtacacatttccttaaaccatttaatctcccaataaagacaataacaaagtaaaacttctgcctatcatgacacagctaatctgtgtacaactgaaaatatgctcttttcctgggagagaattcacagtccttgactggtgttcacttttatccttgataatccagtaactttaataatattatgtaaatgtagctattttaataaattttatgttagatgacaaggggataagagagggaagaaaaaatacataaacacaaacattcataacaaaacaatgaatactcataataattatagtactaacttctgcaactgttcacatgatgtgttttataactaccggtgttacaaaattactgg

SEQ ID NO: 1638 - DNA, 478 bp, Homo sapiens; identical to SEQ ID NO: 1636

SEQ ID NO: 1639 - DNA, 1011 bp, Homo sapiens; identical to SEQ ID NO: 1637

SEQ ID NO: 1640 - DNA, 5033 bp, Homo sapiens
cgcagaaccaggaaagtaacggctacagacagtgagaaatagtttcgctcgccggctagaaaaactctgtcggtaccaaccccagagcgttgagagcagcccacctccacgcttccttaacggagaggtgcaggactcagacttcaccagcccactcggtcccagccttgtacgcaaagagacgccaaggacgcgctctcccgcgtccaggcagccccagcttgctggcttgcctgcccgcctgcgtgcagcactcggccggcgtgcagcatgaccctgtggaacggcgtactgcctttttacccccagccccggcatgccgcaggcttcagcgttccactgctcatcgttattctagtgtttttggctctagcagcaagcttcctgctcatcttgccggggatccgtggccactcggtaagggtgtcctcatagtgcaggtagagtgggggaaggctcatgggcagattgtctcctgagggacccaggacaggtaagactgtacaagagcctccatgaatagtcgaattgaggctcaggtggagtgaagtcaggagtctggtgcagcaagcacccctttccaaggatagggagagctccccatccaggatatcctggagaaggaccccagctgggtccttgggaaggctgctgcagagaatgggcacccagtccagtaatcctgaggaacagtataggcttcttgtgctggagggcctcccacctctcccaggactaaagctgcactctcatcccatccggtgggtgatgaccttcaggccaaaaggacagatgccagcagctcagactgcagtgttcccctttgcactgggttgagacacatgtgtatgggtgcctcatcctcaggactgagactcccacattggattagaagttggagccaactgggtgcattgtcttagactttccccctctcccagaacctaggttgtgcatttttcagttctgggaggacccagcttttctgcatcttaatctgtgttgctttccctggaactggtgcacctaggagtatctgcattcccacctcctcccctcggagatcaggctggggcctccctcttctgagggaggtgacccctgcgtgcctagcacttctggactcactgagcctcaccaagcagtgactggaccaggaggcagaaccaggaccaggcgccagacagctaggggagtgaaggtggtggaagagtgccaggaagtgggggtggaggggaggtgctgttagggtagatgggaaatggggctagggaggtgaaagtgcgtggtcacaaaatatcagaaatgccagtagcccagagggacttgcaggaaaagcgtgcctaacattagtctcaaaagtctggatataactaaagatccaggtgaagtggggtcaagggtggtcttggggactctggtttggcagggctcaggcctgacccgggtgcctattcctgcagcgctggttttggttggtgagagttcttctcagtctgttcataggcgcagaaattgtgggtgagtgtgtggtgcagcccatggggagaggacggggtgaggaaggaggtgggcagagggcacctgggacaatagggaactggggttggttttctgctccctcttcccactctccagctccttctagggcccactttttggcccttaccatgcaaccacattggacctctaagtccccatctctctgcagtgtcccacctcccataccactctctaattccattttcccaccctcatcccacccccaccgtgtgcctttccctacagctgtgcacttcagtgcagaatggttcgtgggtacagtgaacaccaacacatcctacaaagccttcagcgcagcgcgcgttacagcccgtgtccgtctgctcgtgggcctggagggcattaatattacactcacaggtgagggggctggggctaaatgaactcctggagctgggagatccccggttaggtgagtgtgtcagggatagctggagggcctctcacatcccacaagctcaaatagcttgtggtcctcgtggatttgcgttttctccaaccaccaccgaacccatttctcccgccgagagcgccacacccccactttcctgtctgaatccgcttagttgcgaggtctccgaccgcgggcagccccatgagcccgcctcaccccacagggaccccagtgcatcagctgaacgagaccattgactacaacgagcagttcacctggcgtctgaaagagaattacgccgcggagtacgcgaacgcactggagaaggggctgccggacccagtgctctacctggcggagaagttcacaccgagtagcccttgcggcctgtaccaccagtaccacctggcgggacactacgcctcggccacgctatggtaagtgctggagggaaggctgtgtgcacgtgtgtgtgtgccaggagctgggccgtatgagcgggaggatgcaggcctcggaggcgctgagcagctgcagccagacccgacgcgctcggggtgggcatgacagcctcgcgggttagaagatccacgagatctgcacagacggaatccggagagactccagccaccgcctggacctcaggagcccgcttctcccccggggaattcccctgcaccgctgccatcccagtccctggctttgacgctggggtagggataaagaagagcgcagctgtgggaaccccggtgggctgggagaagcccgctcacagcgggtccccccactccccggcagggtggcgttctgcttctggctcctctccaacgtgctgctctccacgccggccccgctctacggaggcctggcactgctgaccaccggagccttcgcgctcttcggggtcttcgccttggcctccatctctagcgtgccgctctgcccgctccgcctaggctcctccgcgctcaccactcagtacggcgccgccttctgggtcacgctggcaaccggtgaggaccgagagaatgggccccgggggctaagggtggagacaggattcacaccgggtgtgcactttccagtttacagaatgaattcacatctattaccctatttgcccctctcaatagttcgcagaaacaggcactgttatgaccattttacagatgaaaagtggggggctcagaagggtttggtgtcttgccgtgtttcatgtaattcagattagaggtgtgtggcgggaggtaacacaaggggtaggctccaaaagatggaagaaggcccgggcatcacgcctgtaatcccagcactttgggaggtcgaggcaggaaggtcgtttgaggccagagttcgagaccagcctgggcaacatagccctgactccacatgccctcctttctttcgatccccaccgccacaggcgtcctgtgcctcttcctcggaggggccgtggtgagtctccagtatgttcggcccagcgctcttcgcacccttctggaccaaagcgccaaggactgcagccaggagagagggggctcacctcttatcctcggcgacccactgcacaagcaggccgctctcccagacttaaaatgtatcaccactaacctgtgagggggacccaatctggactccttccccgccttgggacatcgcaggccgggaagcagtgcccgccaggcctgggccaggagagctccaggaagggcactgagcgctgctggcgcgaggcctcggacatccgcaggcaccagggaaagtctcctggggcgatctgtaaataaacctttttttcttttgttttttaaaaactgtttttcccattaattttcatggcttctccgcgccggggtcgcacgtcctcatgagcttcgctgggctggagacagcctagtacactctccgcagtgctgtgaaacctgattctctgcgtcgactccagagtaataggggcgccctctagtgaggccggagggaccctaccagagctagcatctttctgaaccaccccagggggacgttaggtggcagtgatgaggcaggtcacccactcccccgtcctggatgccactcagctagcccagctgagtggggtgggaaggaatagcgttttggagttgattccctaacttcccacctggcttcttgtgaggtggtgtttgagggccaaggtaggtgtcagcaaggcatagaaagataaatcccaagattcttggcaagtcttgcaatcttatgtagcaaatttgggaactgaagctcaaagagaatgtggcatagttggttaatgttagacctaggatgagaagtttggtttcccctcctttccagtgctgtctttcattgtaccaaaaggccacacaagctggagaagtaaaggaagaacaaaaggaacccaggaaaaaggaaaacaagaggtgccgagggatgagaggaaaccataggagaatcatatgtaacccccaccctgctggtgttatgggggtgaagttaggtttcagtgaatagcatcttgaagaggcaaggcagcacggaaaggctgggttgctgtgcagataagctagcccctgcttggccttatcatggcaacaggctttatggacaggcccagcatctcttcagtcccttagggctttttgttttgttttgttttttaacatcagtatatagagcctcctttttctactccgtctgtagattggtgctgggtgtctggtaacagccaccctgagggcagttctgctggttttatggggcgccaatgaggtttggagccagactggaagtccaggtggcctccacggggaggaatgttataaagcacaatcaggatctttggggtgtgcctccttacagtatgccttggtggaggaagcctctgacaggggaatgtcctgggacttgggactgtcagccatggaccggtagcgggggctcaggagtccaccttcctcaggactccactccagcatggggtcttcatccacactctggttgaagaaagccttcagcctgtgaggctgcatcctgtgggccaccgccatagccaggcccagcagcacacacagcagtcctg

SEQ ID NO: 1641 - DNA, 134 bp, Homo sapiens
cccgacctgcagcccaatatcagcgctgatccactcagaactgaaggccttgtatgatgtgttggtgctgacctggcccacagaccactcagaactgaaattcacagctgtggttggggagttggacatatggg

SEQ ID NO: 1642 - DNA, 8896 bp, Homo sapiens
cggtggcggctgtgtgtcgccggagccgaagcgcgcaggcccgtcccggtggccggggagcgggcgggtgggggcgccatgtggttcatgtacctgctgagctggctgtcgctcttcatccaggtggccttcatcacgctggctgtcggtgagactgcacgaccccggcccgcgcgggctcccgccccggcatcggtgctcgttgggggtcgcatcgcgggggtttcggagccactcgggggaccactgcccggcgctcccggccttcgccgccccaaccccttcccgcctgatcctgcccctcctgtcgagcctggcagcccggcctgaccgtggctccttccaggtgtcacagagtccgctccggcactgcccgagaaagggtgactcgagtgccgcccccgcgtctgcggaccgctaaccgctgcggctcccactcttcgcgggcctgccgcgcggaacttttccccaacgcctaccgccgcctttgcgcctctggcccttcatgctccctgctctctccacctttgacacttctcctctggctggttcccattcggcctcagttgagatgtcatcttttccgggaagtccacaggggttgatggtccagcagtgccctgtcctttccctaaagtagcatttctcacactaaactcgtctgtctctccctactgttccccttccctttcccaagctgggtcagggaaggacccttgtctgtctttttcagctgtattctcagcccagggacctggctcatgccaagtgcccagcaggtgtttattgaatacgtgaaattccgttttctgagccagaggttatcattgtactgtggcatcaaatgcagactttcgttgatttttatgagatttgtccttagttgccctaagaaagttttacttctccagacttggaagggcaacacatgggatgtttggtttgttcttgaccttctggggtccatgaagggtggatggggactgggctgcagagagaggggtgaccaggatggtgggagtgaccctggctgatagtctccctgcctcccaccctgcagcggctggactctattacctggcagaactgatagaagaatacacagtggccaccagcaggatcataaaatacatgatctgggtaagtggcatctttctccaggagtcctcctcactcttttgccctgcctcaaaagcaggaagtggggagagtttggcatggatgatgaggcctgtgtctctgctgtttcctgagcatacactcttacctccttgccctgaacgctgtcttttgggtctgcactcctgggcccagatcttccctggccgccttccccaagtggcattgtttcactgcaggccttgtgctctagtccttaaggtgacagcgaagtgtacttctctgttgacaagaccgtagatttgactttgcttagctctctcccgctgtctttagccctttgctctgctcacagcatttaaaacttagaggagccataagacagttttgcatatatgttcattgccatctttctaatcggatcaagtgatttgtcctaagatcggcacagcttcgctgccctcgcccttccctggtctcatgggaggcttctcttactgaagacacagtccttgccactgatatcaaagccataggggtgactgctggtggacagacttccttcagctgcaggaaaggctgggggtaggggtgccattggagagaaagcgtccacagcccctcaagtcgcctggtgtcagcagccatgtgcactctgggcatggctgaggttgggagttcacagtggaggcaagactatagccctcagctctggtccagaggcccagcttgtgggtgttggcacagtaattagcccttcattcagccaactgtcatttgctaagcactgacaactgtaggtacttatcagtagtgtttttcaaactgtaggcatgattcattatttggctgtatagtaggtcacaatcagcattttttaaaaaaaggaacataaatagaattgaaatttgagctttgaatcatatatatgtatatatgtgttggggtcacagtgtaaaatgtttttctttttctttttttttttttgagatggagtttcgctcttattacccaggctggagtgcagtggcacaatctcagctcaccgcaacctctgcctcctgggttcaagcgattctcctgcctcagcctcccgagtagctgggattataggcatgtgccaccatgcctggctaattttgtatttttagtagagatggggtttctccatgttggtcaggctggtcacaaactcccaacctcaggtgatctgcctgccttggcctcccaaagtgttgggattccaggcgtgagccacctcgcctggcagatgtttttcttactgtgggttgctgtcaaaaagtttgagaaatgggctgggtgcggtggctcacacctgtaatcccagcactttgggaggccatcagaagtttgagaccagcctggccaacatggcaaaaccctgtctctactaaagacacaaaaattagctgggcgtggttgtgcatgcctgtagtcccaactactcaggaggctgaggcaagagaattgcttgaatccaggagatcgcgccactgcactccagcctggatgacagagtgagactccgtctcaaaaaaaaaaaaaaaaatgttgccttttgggagcagagaacctagctggggaggccagacctgtgaaatgaggagattgaagcatgaacctagtgctgcccagagcgggctgggggttggtgagtccaggaacgttgcctggaagaagcgccctgcactgtctgcctctggttgtttcagttctccaccgctgtactgattggcctctacgtctttgagcgcttccccaccagcatgattggagtgggcctattcaccaacctcgtctactttggcctcctccagaccttccccttcatcatgctgacctcgcctaacttcatcctgtcgtgtggtgagaggggacagagttggggaggcagctgatgtggttgggtgtgcccatctccatcctgggcactaaaggggatacagaaaaaggaagccagctgttgaagtcctccaggaagccaggctagttgggaagatgcggttcttactgctgaggactctagagcccaccttggctctagtgaatagaatttgttggggctggggactcagacagggagggctttcccagagaggtaagtttgaaggagagtttgggaaagaagaggttgtggattggctgaggcagggcccccaactgagcagttccagcctcaaaaaaaccacttggccagaaaaagcccaaagcccttccggtaggcaggcagctgtccgtccagtcctctgacccaaagtcattgttaggactggagcctcatggggctgtgagcaccttgcagactctggcctggtgtgaatgcctcctgggggctgcagcttctcatctcattctcactggctgccgctgcctcgggcttgagcctggatgtggaggacccagtcttcttggcgttgccctgccaccactttctgaccctggggaatcattggccctctctgggccttagcttctccatctattcagagaggatgtttctgaaagaactattgggagactcagtgggcatatagtaggtgcatataggtatttacagatattcctggaaaaggcttcggaaagtattttggttgccaagattgccattgctcctgttcatcattgctggctaccctagctttcagtcagggtatcagatggagttaggggttttttagagtgacttttctatttctatgagagagcctggagggtgaatattatccacacaaagggcatattgttaaagccaaaactggtttcttccttgggtgtgatttcaccaaagaatttgttcagcagaggtttgttagggagcccttccatggagaccaggcccctctgtccagggaagaagtcctgcccccagcccctcagcagcaggctcccctgacttcactcccttgatctgccctttaatgcctaaaagagtttttccaaaagatcttgtgggcaccaggcactatcctacctcccattatctcttagccctagagtgtggctaggcatagcagaactgtagtctttgccttagaatgggagaggcaggagagaagaaaggagacatgagaattgctgtgaggtgtgtgtgaggggacagtcagtttcaggggacatgttctttctggtgcctgcccttcacctcaccatgggaaccggcagggatgactgtctcttgagcagcctgtgtccaggatatgcacacgtgccctcttttataaactcagttacacaccaaggaggggtggctgtgtgtgtgtgtgtgtccagaacgtatcagttcacaccggtatgccttacctgggggcaggatgaggagggaccccctcccccagaatgttgaggaacctgaagactgcacctcaaagcatctagcaagtcttgcccttttattcctgaggagtgagagcctttttatttgagcaggccttctccttgctgcccagtttgtttatttgagcaggccttctccttgctgcgagtttggagtagagcctcttaggggcgtctggtctgcacacccatgatttctccccacctgtcactgtgggagagctttctttagccctcacatccacgaaaaacgaggttcatcgtcatgatgctttggattatgtaacatagaagtctcacttttataacatgcaaagagccttcttctaattttactcagaatgccctgtgcagtgggcaggttgaggctcattctcccattttagcagatgggaaacggttctaggcagtagcctactctgagttgagtgtaaagtcaggcctaagactccatggaggctcccaacttctgagggccttttgaagttaaaagtacagctttctgttattccccttaaactgactgactcttcattccctcaacaggactagtggtggtgaatcattacctagcatttcagttttttgcagaagaatattatcccttctcagaggtaagaagtgtccagcacattcagctgttaacagggacagggtagtaaaagggaacttgcatggtttactttataaacttagctatgatttgaaactgaatctgttcaaggattacatgtttgaaaaaaacaaaacatagatggtttgagaaagctgtgtggatggggacagactgtgctcatttggccgaggtggggaggacactgctcttcctcagtgagtcctttgggtccccctcgaggggtcatcctgaggtcaggaaggggtactagggtgaccttctctgacacagtcctcacagggcagggatggactgcacccctgagccccagcttttcccagtggccgccaaggttttcttctcccacgatttctccacaccctgctgctccagtttgaacctctgggaagagcaaggtcacttctttggggggtgtgggtcagtcagtcatggcttagcactttgtctgcctccttcagtccaggggagttgcttgtcctagcgaccaagatatggggtttgtggccacattcagtcattttcagcctccacctttccccacagaaggatttccatgtctgagggtggcgttccctgcttcccaggcctgggccccctttggagatcaggtgtggccccctgtgcactcttgaccaacacgcagtcaccacacccagcccactcttggcacctccggggcaccctcttctcagtctctcttgttgccaggtcctggcctatttcactttctgcctgtggataattccgtttgcgttttttgtgtcactttcggccggggagaacgtcctgccctctaccatgcagccaggaggtgagaagggatttgtaaggggcccaggtgggggcaagccagcaaggcctgggttggcaggggtccactgagggaacctgaatctagccctgtgttggagacacctggactcggggttgggagggccgtgttcacacacatgcgcacacacacacacacactctctctctctctcatattcttgcctgtatctccacagatgatgtcgtctccaattatttcaccaaaggcaagcggggcaaacgcttagggatcctggttgtcttctccttcatcaaagaggccattctacccagtcgtcagaagatatactgacccccatgcaggcaggatgtggggggcaagatcaggagagtcaggcccctgggcctctatgccaggtggggaccagaagtcgggaaggcacctaccacctgccctggctttcttcccctcaactctggagccccatccccaccctccttggggggctcagcttggctcagatctgatgcttcaagaggctgtaacctcagagggcaccaaggagggtggcagagcctgcttagccaggaggccgaggtccctcagtcctcccctgtcccttccaaggtgggtcaggaggttctggccccgctggggcaggcagggcagggtctgtgaagcttaagagcagatggtgacaagttctctgggcaggtggccatggggaggggccatggcttggcatgtccaacagaaatagtttttgctgttgaacggtgatttctgtccaagtgcagatttccgtttgaataaagcttcgcttctaggtggcactgtttgccttaataccctgacagttcatcttcctttcttcctgctaaccttctgctctggactggactcacttttctgctccagggactccttttctgggtttgggtcttgcccttcccaagggactgttcttgtggcccttaatgggaagggggcaggggtgaggagctgagcctgctcaaggagtgggaagtggggctataggcagcctctctgatgcactctcttccatctctttccccaaggctccgtgactgtcaaactgggagtaggagaggggacaatttaggactgggctagattttcagaagaacatctacaatatcctatttataaatcttcctctgggaaaaggagtggtttctggctgaatactatcttaggctcaaggagaaacaaaataaaaattagcttccaggcagcctgtttttaaagaaatgggactaatgggagaagctgtttgtcactctaagagcatccaagccctggcccgtctgtgcactcttggctcctggggagatatatctgccttctaagaaggcaggccaggtcttgggcacagacctgcatttgttgaccttgcactccaactatagtgccttgcaagtgctcaacagtacatattggaatgaagtccctatgagagccatttctggccatgttctatacctcaaagtgaggctggcaggtacagagatgaactgtacacatgtgatacatttaagccactggaaaaacccctgtgcttgaaaatatttcctctatatcatgcctggagttccatcatagcccttcatttccttggctttagcatttaccttctcttaagaataccagctttcccctttccctgagaggaagagcacatgttggtctcctcttagtgtgaacgagattgccaggcccttttctcctatgcacaccaggatagacaaggcaggggatactggcagcctgcatcatcctcccattgggctgacagctggccctactttcctccctctgctgcttggtccctcaccttgatgatgtggcttcgccccctccactctactgccagtgttctcccagggcttgctaaatccagcagacccctttcctgtcttactagatctgggcagcatttgacatggctgatcaccccttgcttcttggatggcacttccctggcacctctgtggctagttgtcctacctccctggctgttcctttcaggcttccgtgcaggcttctccacttgcccatgcacagtagggtctttcagggttctgctgtgggctccctagggaagcccatccatctggatggtttcaaggatggtgaggaatttagagttgacctccagccccaacatccttcctgatcacctgaaccacagttttgctgccctctaggtgcacagacaattcaggtccatggcccagatggtacttgctgtcttctgcaaacctgccccttctgggtacttcccttgaccccgagatcactcaggagccagacaggaaacttattctattcctgttttctctttctgcccaccacatccaatctctcaaaacggtcaggtctaccttaacatctcttgatttgagccactcccactgtcatcagctttcacctggattatcgtgacagcctcctactgcttctctatcatgtggccagagctatcttcctaaaatgcattgcatagttgatcaagtcactctctggcctaaaaccttccttggctccctgctgccctcaggataaagtctggacccctcagcatggcttgtgagactcatggtgtccttgtccctgctcacctctctggtctcatcacttgccttcttgcattctgggtcccagcctcctgtatccagagatgcagtggctctccattgccactctgattcctcctttcttttggtcacagagaaagggtactttctctgtcaaatctcaacttagacttgacttcctccaaggagctttggctatactctctcctcccgacccccaccctggcatactacacagatcactctgggctcacttgcctgcctaatggtcatctccccagtagactgtaagctccttgagggcaaggattgtgttggaatttttgtattaacagtgcctggcttggtgcctggcacctagaaagcactcaataaatgtttgtttaatgaatg

SEQ ID NO: 1643 - DNA, 854 bp, Homo sapiens
tagcagggaagcccatgccagggggacatattagttgccctccaccccattctgggtctcagcttagagcctgcagcaggaagggcttaatctgaacaagaaacagaatttcccagtgggtccttccatcctggaagcctgggcccttagggctgggagggcagtgggggtgccaaaatgtgacaacttttacaatgccaaggtgaagaatagtgtctgaccccccactctcaacctaacttggatttcctggcggcggtgggggggtgccaagagatttatttgcagagaaaagggaggcctggggtctgggcttttgattgggaagggtgactcctcgagcttgggagtgggaagcccataggcacccctccccctttcctcgccacccacaacgtgaattgccacacttcagccttcactgggctgcctcagggggagaggtagccataataactttatgggttggtttgtggggagggcagggtggggagtccttgatgagatcgcacagctgccaggaaggcttcatcgaatgtgtcacgcaggttcatggccagagtgtcggtccagaaggtgttgtcacccaggtgccgcttcctgggcacttccctcatgctgatggggtaaaagccctggggcaccttcattctgtatggccatacacgtgggtacagcatgcgcagcagcacctcaaaaggcagccgcggcacgggcgccacccagtggccgtccactgtgtgcagccgcgcaccgccgtgcccatcaggcctcacctccaggaagctgctgaagtcgtgctccggagtggggtctggatgcacgcccaggcggatgccctgcgagtggctgat

SEQ ID NO: 1644 - DNA, 397 bp, Homo sapiens
tcttgttctacatactttattttgcatgcctgtctccgccactagatgggagacttgttgacaaggactaaccggttccaggtgcccctcaggaaccctcccagaggtgtagtaaatgcatccagcgcctagcggacgccctgcgtgcccggcaaggggtgaggtgcaggcgatacaaaggtgcagaatgtaccccaaaagaacagcctagaggggaattaggccggaggatgaccgattaaaatcaccccaactcctgattgtgccgcttcctaggtgcatgacccagggcaacttcctttggccccggcttccccgtctataaaatgatttacattatctgctcaaatttccgacaagaacacacctcgcctttatcacagagcgtggcacatat

SEQ ID NO: 1645 - DNA, 364 bp, Homo sapiens; identical to SEQ ID NO: 1530

SEQ ID NO: 1646 - DNA, 686 bp, Homo sapiens; identical to SEQ ID NO: 1532
  misc_feature (95)..(95): n equals a,t,g, or c

SEQ ID NO: 1647 - DNA, 364 bp, Homo sapiens; identical to SEQ ID NO: 1530

SEQ ID NO: 1648 - DNA, 288 bp, Homo sapiens; identical to SEQ ID NO: 1534

SEQ ID NO: 1649 - DNA, 288 bp, Homo sapiens; identical to SEQ ID NO: 1534

SEQ ID NO: 1650 - DNA, 149 bp, Homo sapiens
aaacaaaaaaaaaaaaaaaaaaaaaaaaaaaaaaaaaaaaaagaaaaaaaaaaaaaaaaaaaaaaaagaaaaaaaaaaaaaaaaaaaaaaaaaaaaaaaaaaaaaaaaaaaaaaaaaaaaaaaaaacaaaaaaaaaaaaaaaaaaaaaa

SEQ ID NO: 1651 - DNA, 151 bp, Homo sapiens
aaaaaaaaaaaaaaaaaaaagaaaaaaaaaaaaaaaaaaaaaaaaaaaaaaaaaaaacaaaaaaaacaaaaaaaaaaaaaaaaaaaaaaataaataaaaaaaaaagagaaaaaaataaaaataaagaaataaataaaaaaaaaaaaaaaaa

SEQ ID NO: 1652 - DNA, 202 bp, Homo sapiens
aaaaaaaagaaaaaaaaaaaaaaaaataaaaaaaaaaaaaaaaaaaaaaaaaaaaaaaaaaaaaaaaaaaaaacaaaaaataaaaaaaaaaagaaaaaaaaaaaaataaaaaaaaaaataaaaaaaaacaaaaaaacaaaaaaaaaaaaaaaaaaaaaaaaaaaaaaaaaataaacaaaaaaaaaataaaacaaaaaaaaaa

SEQ ID NO: 1653 - DNA, 4171 bp, Homo sapiens
aggtcagaccgggaagctgatgtatgtgatgcacaactcagagtacccattgagctgtttcgccctctttgagaatggcccttgccttattgctgacaccaactttgatgtgcttatggtgaagctcaagggctttttccagagtgctaaggccagcaagattgagacccggggcaccaggtaccagtactgtgacttcctggtgaaggtgggcacggtcacaatggggcccagtgcccggggcatctctgtggaggtaagaccttggtgaaaataggagcaggatgttctgagggggctgcttagcaaagggctctgaagattttccagttcttctctttttttttttttgagacagagtcttgttctgtcacccaggctggaatgcaatggcacaatcttggcacactgtagcctcgacctccagggctcaagtgatccttccgcctcagtctcccaagtacctgggactacacccaccgaattaaatttttttttttttttagtagaaatgaggtcttactatgttgcccaggctgatctcagactcctgggctcaattgatcctcccatctcagccccccaaagtgctggggttacaggtatgagccaacacacctggcctccagtcctcaatttaaacagatatttatgcctacctgatccctgactccaaggcatctatgcttcctcttcgtgaatcttttatcctttctttaattattcagagactctctaacacagctggcaagtaggaagcgggaagctgggttcaaagcaagcagaaagcttcattaggaagggtggcttgctggagaagggaaaagatagtcaaggaaggcaggtgagttatgatatggagggacagtcacccatgacaagaagttctggagcagaccaggacaactcttagaacaattttctggcggtgggccctaaatcacatatgcccatatacctttccttagtatgctttaagataggttgggaagcaaaaatgtgcttttccttttgacatgctgtctgctttctttcatggtagaaagagtgtttgtgtgtgagatcacttcatctgtgacacagagagtgtgtgtgtgtctgtgtatacatacacatatatagtgacaaggagtgagagtggcagtgtagcagtggctggcttctttgggaccagggaaagttcacaacctataatgtgcccagcactgagataagaaaacaagtaagcttgcaggtctaccctttgaaaatttgtgatttatttattaagagtgaggctgaaacacacaaactctttttgaagttagtctgaaaatgctataaaagaggcagttggctctgggaattcaggccagtgtgaacactgctgactttggttgtgatgcttcctgaggatcaacatttatgtagggatttaaaatgtagagacatggggatagataagtctaggaagaatcccagttggagaaaagggcattagtggtagtttctgctcagcaacctctaggaccaagacttctaaccctttcggcttgtgatagaccttggatttgctgagacccactgaggacccgctgtttatcctccacatttctaatcttgtagtagaaacacactccacctgtttctttacttatttctccttagggttgccagtaattttgccctgccatctctccagtaaaaaattaagagagcagaaggagaaaacctaagatgtatattttttggcccatgacacactatttgggaaattctttcttagggtcagaacccaggttggttctacttagggagtaaaatttggtcttgaaaaaaactcatgagcatatgtgtccactctactctctacttaccacccccacacacattttccttctctttctctttgttgtgtctcttagaattttcttgagctctccttgaatctttacccagcatagcagggacaacacagtcctgagatcatcaaaaggggcccagatctgcttctgggtcctctgggagggctgcgggttggcacagctccaggatgagaaggtcaaagatgcctaaagatgctgggtattgagcccagtgtttaggttgaatgtttcctgtggaccaatactgtgctaggaggtgtgtgtctttagctcggggttggggaagatgggagcaggaggcaggaggtacaagagaagcagaccttgtcttagccttcattcaccctcattctctgtgcttttggttcccaggtggagtatggcccctgtgtggtagctagtgactgctggagtctgctgctcgagttcctacagagttttctaggcagccacacaccaggggctcccgcagtgtttgggaacagacatgatgcggtctacggcccagcagataccatggtccagtacatggaactcttcaacaagatccgcaagcagcagcaggtgccggtggctgggattcgttagtgatgagcagctgccagctgagctctgtcaccaggggtactccacaggaggagcaggtgctgactttcaggtccctggaccccagaaacccagggtagacatggactctactctccttctctggttctcagctgtggcttttgttctggggctgagtcccctccccaaccccctgactctcacacatagccccccatcagctgttttactccgtgccttactggatttggcctgtcctcaagaatggtaattatgaagagtggagaagtttggaccttgcctcctttaggggaaaggtaggacaggaatgtccctgcctggtactggtgggggaaatagtccgtatccccaactattaaggatttgtcccaggccaatggtgaacatgctgcattttatgtttggattgtgctgtaataagagcctcttccttccctcagaggatgtggctgggcttctatcctagagatggagtagaaggcacaactggtttgatagttactattttctgacctgtttgctgaagtgatttgcgaattgactttcctagggtgttgcctgagtcctttgaaatctccttctgacatctttcccttctgttgtgaaatatgttaagccacaggccaaactgctataagatcgaagtttgtttttttctcacctaataatagagaggtaatcagatggtctagggcagatttaactctacaaggttatcaggaactttgtttccttctgtcttattcagccattcccagtatgttttcttacccataagatcaaagcagactcatcagctccatatctgcattccactggggaaagagagagagaaaagagcagattttaaaaaaaagatatgactgagcattgctcagatcactgtggccacactttgctgaaagagatgctgggacatagaacctcttatctgggcagtcatgtgctgagttaaaactcagggattctgtgactacaagatgaaagacaatttggttgctgagatgcagttaatggcttctgttacatggagctcaatggacgtgcccaggaatgcttttggctgttattttgcagttaatacctcctgtaactaaagcatttgtttatgagttgacttgagagaagggctgatctcagagccgctttgagctaagttggattagtcacactaggaagttaattccacacctttcgtctaagtctcagtattgaggcctctccagttctcatgcaccctgatcttagggttagaatacttgaccctgatacctgcaccatgcttcatggttcctgagctctttctcctgtttcatttgagcctccaaactacatatttggtcatattgcctgcctaccccatgcctgctgcagaaatattcatccaggttaaccttgatatacacagagatggtcttggagaattgtgaatgtatgtactgtattgtcatcaaggatactgtcccttatttgaaggcatctaaagagaaactgttttcagatccaagtgctcagatctaaagcctctgcaacaagtcaggtggtggtcatgtttcccttctagttttggctgacaggaagctcagttcagtaccataactacagaacctgtcatctgtattttttgttctcaccccgtttttgttattttgtttctggttttttatattgaggtatgttttagatatagtttacaaaaataaaacgcacagatctta

SEQ ID NO: 1654 - DNA, 158 bp, Homo sapiens
taaaaaaaaaaaaaaaaaaaaaaaaaaaaaaaaaaaaaaaaaaaaaaaaaaaaaaaaaaaaaaaaaaaaaaaaaaaaaaaaaaaaaaaaacaaaaaaataaaaaaaaaaaaaataaaaaaaaaaaaaaaaaataaactaaaaaaaaaaaataaaaaaa

SEQ ID NO: 1655 - DNA, 170 bp, Homo sapiens
gaaaaaaaaaaaaaaaaaaaaataaaaaaaaaaaagaaaaaaaaaaaaaaagaagaaaaaaaaaaaaaaaaaaaaaaaaaaaaaaaaaaaaaaaaaaaaaaaaaaaaaaaaaaaaaaaaaaaaaaaaaaaaaaaaaaaaaaaaaaaaaaaaaaaaaaaaaaaaaaaaaaa

SEQ ID NO: 1656 - DNA, 151 bp, Homo sapiens
  misc_feature (4)..(4): n equals a,t,g, or c
  misc_feature (45)..(45): n equals a,t,g, or c
  misc_feature (89)..(89): n equals a,t,g, or c
aaanaaaaaaaaaaaaaaaaaaaaaaaaaaaaaaaaaggaaaaanaaagaaaaaaaaaaaaaaaaaaaaaagaaaaaaaaaaaaaaaanaaaaaaaaaaaagaaaaaaaaaaaaaaaaaaaaaaaaagaaaaagggaaaaaaaaaaaaaaa

SEQ ID NO: 1657 - DNA, 77 bp, Homo sapiens
aaaaaaaaaaaaaaaaaaaaaaaaaaaaaaaaaaaaaaaaaaaaaaaaaaaaaaaaaaaaaaaaaaaaaaaaaaaaa

SEQ ID NO: 1658 - DNA, 77 bp, Homo sapiens
aaataaaaaaaaaaaaaaaaaaaaaaaaaaaaaaaaaaaaaaaaaaaaaaaaaaaaaaaaataaaaaaaaaaaaaaa

SEQ ID NO: 1659 - DNA, 117 bp, Homo sapiens
gcagtggcacaatctcggctcactgcaacctccgcctcctgggttcaagcgattctcctgcctcagcctcccgagtagctgggattacaggcgcatgccaccatgcctggctaattt

SEQ ID NO: 1660 - DNA, 1940 bp, Homo sapiens
atttgtaaccaggctgtcattccatgtttgtttggaagcttagagataacatttatgaactttgtgacacatagtagttgctcaataaatgttaactgtagaaacacattgattagtttcacttcagaaatagacacttagagttcaaaattcccatctgcctagctcctgaggcccactttcttaccagaatctttcctgataccctctcctgcataaaatggttcctcttttgagactttgtagctcttttgtacttctcttattctgttacgttactgcaaaaaaaaaaaaaaagaaagaaaagaaaagtgccaattgtgtacatgctttcctccctgctggaatgtaaactttgtaaaggcatgatccatagcagatacttcttattacaaactacctggcagaatttctttctaaagaacctactcagtaagcctgttggtgaactgagcaacatttggacaattatggcatcatcttacaatttttcagctattggttttcacttgtttagaaatgtaaaactttgcaaggacttttataaaagcaaatttcagaatagttattcactaagcttttttatgctaatgatgtcatgctatcaaaaattagctagagtaaatggactgtaatgaggatggtttgtaatctagattatatgttccacatgtaacatcgaaatgaaatataaaattgagttgttggcatgtggttgtggtgagcagaagcagttattatacattacttggtaaaattcatattcatatcttgtcagtttacagtgagccagagattaaaaataacatttgtttctgttttagtaactgcttaaaaatatccaaaatcattttattttctttagcctgacttctagtagtgttttgaatatgtggcctttcaagcagtaatgaaatgcatcaatgcgacttggcagtgcctcacaggacatgcttctaggatcatttttaatgattaaaagtcaaattgagttctaaaaaactgacccaaaatatagatgagccaagtaaaaacggaaggaaatctgaataaaatcttggttcttggtcctctgcatgtatcctccacatctgttttctccagatctcttttttcttgcttgttgatagcacagaggaagatcgcagagagtaatgtactgtatatgtttcacatcccccttcctctttagtgatagtttggagagtatactgcagtcaccatggttttcagtttggagagtacaaggatcagatctgtattttctagagccagcttttgtggcattctggagaggtgattggagaaccatgagagcaggcagacatctgggtgagagggcacgaggggtgagtgacggcagagccagacttgctggagaggcagaaagggaaggattcaagtagcataaccaggaaatagaattgataggatttggtccctgctgacctgtggaataagggggaaggcagaggagttgattctagtatttctaagttgggccacttagtgatattggggtaccaggaacaggcttagtggacccacagaagtgaccagacccaggagtctctctgagcgcccaccctggcttctctgtgttggcttaccctttcttggttgggggtcatggggtggtcagcttcagtggtgtggtctgaggtgacaggtgctcaggagtgaggacagggagtagacatcaccaatgtgaatgtggaggtaggcaacaagagttattctagaactgacaaatttaatatattttgctgactgctgagttccatttggacaaatacctaatgcatttggggcttaaaacctagatgacgggttgaagggtacaacaaaccaccgtgatacatgtatacttatgtaacaaacctgcacgttctgcacatttgtcccagaacttaaagtaaaaaaaaaaaaaaaaaaaaaag

SEQ ID NO: 1661 - DNA, 292 bp, Homo sapiens
atttgtaaccaggctgtcattccatgtttgtttggaagcttagagataacatttatgaactttgtgacacatagtagttgctcaataaatgttaactgtagaaacacattgattagtttcacttcagaaatagacacttagagttcaaaattcccatctgcctagctcctgaggcccactttcttaccagaatctttcctgataccctctcctgcataaaatggttcctcttttgagactttgtagctcttttgtacttctcttattctgttacgttactgcaaaaaaaaaa

SEQ ID NO: 1662 - DNA, 689 bp, Homo sapiens
aatttttcttttaatgcagtatgacacagaaaacatttggaggatgttgaaaagtaattgtttaaattggcaaagacacatttcagtaagggagtaaacaagagggaaacgtgttggggggaaaggtgtggggaggaaactctagaccagaggccctaggacttgaatatacaacttagtcctgttgaaaattcagattcctgggccttaaagtatgttaaataggtcaggggtggggcccaggagttgtacttttaacgagcaccctcctgtgattcatttaacataaaaggtccttggctcacacttggagaaacactgctgtagaaactcaaatacctattttaaaacaaaggtacattttaatcatttagtttaaaatgaaatcattgcataatactgatgttagaggttagaataaacatgtacttaagttcttgatattcttgtcatttcagttacatgtcagggaatgtgatttgtgttttgacgtattcaaatccttgtcatattcaaccatattcgtattcaaaatatataatgattttgacccttgattgttcgaattaagactgtcatcttttctgtgtgattaactcttgtgttgatataaatatgcctttggcttactaatgttcagtaagaactaatgactcttgggaatgttaatagactctgtgagtcccttt

SEQ ID NO: 1663 - DNA, 102 bp, Homo sapiens
ctatgggaggattgttgttattattgcttgatttacatgctctcattttatacaaagtgtacagcacaatttctcaaagagtaattatgatgccaagaaaat

SEQ ID NO: 1664 - DNA, 689 bp, Homo sapiens
aatttttcttttaatgcagtatgacacagaaaacatttggaggatgttgaaaagtaattgtttaaattggcaaagacacatttcagtaagggagtaaacaagagggaaacgtgttggggggaaaggtgtggggaggaaactctagaccagaggccctaggacttgaatatacaacttagtcctgttgaaaattcagattcctgggccttaaagtatgttaaataggtcaggggtggggcccaggagttgtacttttaacgagcaccctcctgtgattcatttaacataaaaggtccttggctcacacttggagaaacactgctgtagaaactcaaatacctattttaaaacaaaggtacattttaatcatttagtttaaaatgaaatcattgcacaatactgatgttagaggttagaataaacatgtacttaagttcttgatattcttgtcatttcagttacatgtcagggaatgtgatttgtgttttgacgtattcaaatccttgtcatattcaaccatattcgtattcaaaatatataatgattttgacccttgattgttcgaattaagactgtcatcttttctgtgtgattaactcttgtgttgatataaatatgcctttggcttactaatgttcagtaagaactaatgactcttgggaatgttaatagactctgtgagtcccttt

SEQ ID NO: 1665 - DNA, 58181 bp, Homo sapiens
agtttgctggaacattatcagatggcttagggaagacgatggacaatcggcatcagtcagagcgggagtacatcaggtaccatgcagccacaagtggtgaacaccttgtagccggcatccatggcctggctcatggtaagtcatgggtgacatcaggctctgctgctgctggtcctcagaggcgcctttgtatcaatctgattgcagctataaaaaaagaaaggtgggctgggcgcggtggctcatgcttgtaatcccagcattttgggaggcctaggagagtggatcatgaggtcaggagtttgagaccagcctggccaacacagtgaaaccccgcctctactaagaatacaaaaattaggccaggcacagtggctcaatcctgtaatcccagcattttgggaggtcgaggcgggtggatcatttgaggtcaggagtttgagaccagtctggccaacatggtggaaccccatctctatcaaaaatacgaaaattagacaggcgtggtggtacatgcctgtagtcccagctactcgggaggctgaggcaggagaattgctcgaaccctggaggcagaggttgcaatgagctgagatcgtgccactgcactccagcctggcaacagagcaagactccaattcaaaaaaaaaaaaaaaaaaaaaaagaaaaggctgacaacagaggaaatcctgtgttggcgtacctgatagccttccaagctctcttactttatcctccttgcagttgaaatacgacagccggtgagaactcctcattcgctttctgaatgttgtgcacattgcaattccttttcgttctctggcttctgttcccaaagtatcataaggtgtaatcaaccagacctgttcttagaattgtagctgctacttctcttagaattgtaacctctgccttctccttactgatcattccttccaaagaaattgaaatgaggaatttgtggccaggtttgtagcccaggtgttttttagttttacataaatgtgcattcactaaaattataaatttatttgcctaagagatgttggtgatggcatgaatgcatttggtctctgactttgaattcttttaatgctttaattctgagtcatttgccttttgttgcatttttcttaacaatttcttagtacggcatccaaggcccttggaactataaatccagccaattttccaaccaccatccttcagccatgctgcactttggccacacacagctatgtactgcttcccaggtgtgcttccaagtccttgctcacacatggtccttctgctctccctcctctgcctcatttccttgtctatcaaaatcctactcagcctgtaagtcccaactcaatacattttcccagctctattgtccctgttagagttaatgacagagcacagtctgggttgtgtatgtcaccagctgtgtacatctgatagattgagaatgtgaggaggggagaaggaccactttgcattcacctttctccttgtgtacctcacatgacacctggcacatagctcatgcatagtaaggcttagtaaattaaactctttgtaccagatccttaggaaccatccaaagctatcagagtcatatcaagactgatcagtattaattatctgcatttggaagaagaggaaggaatatagacagtaaaatattatatttctatttgtgcttaggacacgtttagaatagagtttttgtttatcagctttcctaatggtgagatttggatcaaaatgcctttgcttttcctaaggctgcccaaccgtaaagggagctgtccctaaggagacgtcaggccagaagtgaaatttggctgaaagtaatttgtttatggattttaaaagttgactgttgggcaatcatttggggttaaggtttaatcattctttctcgtaatggtaatgacagtacattggactcttagaagacttttaaaatgaatataaaatgctttgttatgtgtggtggcctttatctggccagcatccttgtgacgtggagagagcatggctctcctcactttctggatgaacacacaaatgtgctgagaaaatgcatgattggttcaaagttgcaaaatcacctcccatcaagaatcattcctataatatgtacagcctctccaggagccaatggcttcatccaaagaggatccactgagctctgggttatacgaaggcagtatcctagagtgagagtcttcccttaggatgaaaagacctttagaaggtgataagaaccagaatccactcaatccccttgatgtaagaaatgggaattgtgctcagttctctctgcaggccttgctggacccaggttcagtcatgttctgtctctcaggtcccagtctgaattcctgttctgtgtgtgctctgccaaaaactttgttcaaaagtttgggaaagggctgggtgcagtggctcaggacagtaagcccagcactttggaagacctagagggagaatcgcttgagcccaggagtttaaggctgcagcaagcggtaatcatgccactgcactcctgcctgggtgatagacggacaccctgtttctaaaaaaaaaaaaagtttgggaaagagatattgcctcactggagcaaatttacccagaatccaaaagaaatgttgtgaattgttagtacattctcacccaaggagtttcctttaccaatttgtctcactagagctgaagagtctagagagcttcctcacaccccactgtcagagggtaaacatcctgtgagtgtccctggcacaggtcctggagatgctccctagacgggctgcctcttcccttcagtgactgtgacctcttcagcctctgccagcttctggcctcttctaaggtgttttcagccattgctgtcaacttgcaaaatgtttggaatgcctttttgacctggattggtcttttgaactgactccattgagggtcccagccagctttcacagctttttggggtgctcttcatgaaggttttatataatcgccgataccgaatttcatcaaagcatgcagtagcttttaccttatttcaagcatccagtggggttggccagtcacccccatagtgttctttgaaaattgcaaatgtataccatcagctctccatatccacagattcagccaaccatggatggaaaatatttggggggaaaaaagatttcacgaagtgccagaaagcaaaatttgaatttgccacacgtttcaaatactgtattgactccacacaaatgaagtgatatgtgggcatcgtattagctacaataaataatctagaggtgatttaacgtatacaggacggtgtgtgtaggttatatgcaaacacctacagcacattatgtaagggacttgagcatcctaggattttggtatctgcaggggatcctggatcaatcccacatggatactaaggaacaactacatttagttatctctctctgccttagatatctttcttttcttttctttttttttttttttttgagacagtctcgctcggtcgccagactggagtgcaatgctgcgatctcggctcactgcaacctctgcctcctgggttcaagcaattctcctgccttagcctcccgagtagctgggactacaggcacgcatcaccacgcccagctaatttttgtatttttagtaaagatggggtttcaccatgttggccaggatggtctcgatctcttgacctcgtgatctgcccgccgcagcctcccaaagtgctgggattatgggcgtgagccactgcgcccagcctctgccttatatttcataggatgccatcatcttcaaactttccccgaaggcccaattttctagtctcctgttgatttaatcctctatctgtatcctctcctgatcgtccgtaggctgcccaagctctgggatcgaaaaattggccactgttaacctctcagcttttctctgatttttttttttttttttttttgaactggagcacactttacttctgactaacatgtaacatatatcctctgactctggacttaatgggcaaatctgcaggatcctcttctgtgagttggcctgtctgtggcctctctggcacagagattaatagaatggccttaagttatcattccataatcaaggggtttggctttaaatgcttttgcttttgtcctcgtcaggttacaacagcccttgtctttttcactaggtatcattggtggactgaccagtgttataacttcgacagtggaaggtgtgaaaacagaagggggtgtcagcggtttcatatctggccttggaaaagggcttgttggcactgtaaccaagccagtggcaggcgccctggattttgcatcagaaacagcccaggcggtgagagacacagccacactcagcggccccaggtcagtggtgtgggaagaatggcttttgcagtttccagcctaggtctgctgcttctcctaatccatactgatgtgtttaattgtgcactttcttagttatagggtttttaattcaaatacttgtaactgaaatttctgatctgcctaatataaaaagatgaaaatgaggtacagaaacctggcatgaattttttcagataaatatatatatagcatattttatatatgctatatattttatatatgtatgtatatatagcatattatatataagtatgtataactatattatgttatttttctccattagagaggtcagaattaggattaaactgttagaagcttcttctgttcaccaagccaactggatccccacatgcctatgaagaaaactgtcagattgtagtctggttcttactcctacaccccgtgatatagttctagaatccccactgttgttgttcaccatgtgggtctgttccttcttaattttccttccgcttgaaagtatcagccccaaccccataaagaaaagtgccaccccccatccccccagcaggtcagcagttctgctgtgggattgctgtctggccttgataccagctgagactggaaatcagggacagcccatatggttccaaaccccacagaacccaactgctttaacgtagctgtttgcttgaatggcctattttagcctcccttttccagagtgactaattggggattcttatcaacaaagggtataatgaatgttaagggcccagccaagctagactcgacttaagcccagaaggattttgctgctgcttggataatagattttccctgagtgaattagtacgcccttttagaatgcctagggcctggcccacatccacaccctatcactccctcaaataggatgtgaagtgaaattgtccccaattgaagtgaatccatttgtctgtcaccaggaaaacttactgaagacacattactgcagtaggggaaatgctccgattgtggactggggccatgcagtgtgctgtgccagaatgccttccatctggaagcagctgagtaaactctgtatggtttactttagttaagttacattctattctcagatacaaaactaaaacaatccttgagtatattttgaagcatttatgaagttgtggggaggggcaggcagtgaggaggcttcgaaagtatttccagttagtttttccatctctgctcgaagcccaagaagtccacctccagtatttgttaagataataagacttaatgaagtgtaaagctgaagacgcctaagagttcccaaagaagcatgtgtattcttaaaatgtcaaaatagccaagggattggttgattaaaaagggttcaaggtatatgtgataaattttttaaagatgattttgtgctgtgaagttttaataatgttgacgagaaagaaacggcttgaattttatacattgtcagcttgcaagtcttcatgggggtttttcattctttttaggagcacaagtaatgtagccacagtcactgcagaaagaatgtctttgagagggacattcttgtcatttttattagttgttcaacattgccacagaagtttgattttctgtcagccagtacatagctgccatttattcattgcctgtcagtaaatagtgattgaaaatttcctatgaactcagggttgggaatagcagaaaccaaaactgtctctggtctcaaagagcttataatcaagcagggcagcaaacataaaaaattatataaacacttatttgctgaaattgtgacaaatgacatcgaggacacttagagggtgccgtgagactatgatcagagaaggtgatggggagaaggagggtggctaacctagtgatcaggggagttgagacaggcttttctaggaaagtaatctttgaggtgaagcctggagtatgaagtaggagttggccaggtgaagagaagagagaatcaccttccaggtaaaagggaactactgtgtgtgcaacagcaaaaggaaggaacttatctatgtgccaggcattgtctttgtgcctccacgtgtggaatcccatttaatcttcatagttgatttacaaatgaggacaagacagtccagagaagtcatggagcttgtccacagccacacagctggtgggaaatggtagacctagacttagacccagcctatgtcttgaccctgtgcccagcaccactgcattgcaccctgctgcctgggtctgcgaggagggggctcattggatttctcttgtacgtgtttcagagtcagttagtgtcaagatatggcattccacatagtttcttccctgctgactcaagatttactttactattacctgcacactgacatgattcaggtcttgaccaacactgcatttttgtctgtctgtttcctctggcctgccaccttagccttatctggacctcagcagcagagaccatgccctcatgaaggcactggggagccgttcacagtcagcactggccactcctcatctcagcccaatgaagttttacatttccatgtagatgaggcactcgggatatagaaaagttgtgcagcttgactcaaagcagacagtaattgggtagcctaattgaagtttaactgcaagttccaactttgtaggctgcagaaaaaaaggaaaaaaaaaaacaacaacaacaaagtttaactgcaagtttcatgagacagcgatctgcctaaccattcactcctcctagaagcaaaagctaccgtgatcattgaggcacagccggtcttcatatatcctcaaaggagggggattagcttccacatcccttctctattcctggaggtgccagtagtgggagagtcatggcagaagttaccagaggcaagtggggcagaggcaagtagggtatatgtttggatcagtggatcagtgtcctttattgtgcagaaaaagctaaaattacagattcttctgaagggatacatagcagccgtttcaccaatgtccctcagtccatttgtccaggtccagaagtattcatgaggagctatgcgttagaagagagcacttgggctgggcatggtggctcacacctgtaatccagcattttgggaggccaaggtgggaggattgcttgagcccaggagtttgagaccagcctgggcaacacaatgcccccatctcttacaaaaaaaaaaacaaacctggatatggtggcgggtggtgtgcacctctggtccttgctacttgggaggctgaggtgggaagattgctgaagcctggaaggttgaggctgcagtgagctatgattgtgcccctgcactccagcctgggcaacagtgagaccctgtcaaacaaggaaagagaacacttgatctggaaaacaacaggccagagtcccagccaccttacttattagctttgggccctgggtcaagtcaagacatctatgtaagactcagttttagttttttcatctataaagtggggataaatttatctctctgtttattctgcttctcaggggtttgaagcccaaccagagttattttaatgtggaagctataaagaactataaaaatgctgggtgatattattttaaagtcctattaaaggagcgcagagatccttgcaggtggagaaatgtttcagtgccagtttgttctgatgacactgtatctcttaggaacatactggctctaacactatcaccgagggataaatcaccctggtttcttggaagtgagttataaccatctccaaccatcccggttgattgaacaggatccaggggtgttactcagggtttttccccactgtttagacaacagggactaacaaatgatttgaagggattagaagtgagattctgaccgagggttgacctgagcccagggaccaagccaggaatagaacccaagagtccaagagttctgcctctgagcctgcaattggaatgagactttctgcttcctttgtaatatttcatccaagtaaaggcttagatcttagcatctatgttttaaaagacccaaattttaagcagatgataggaaagtaagccataaaactgtgaaagagtactccttccagtaatccatctgaaaagtggccttacaggaaacattggctcttttttgtgtttatttgaacatgattttatttatagggaaccccccctccttatgttcttttagattaaaatacttccaagttcctctccttgttggagtgcgctggcattccaagcgacagccacctaactttcctctgaaatttccaggcaacccaatagttctcaggaaggcaggtgggggtggggagagaagagggcggaggactgcagagcctttggcctcaacatgagtgttgtggaccaatatcccccactgcatttgttcactgtacaagtatgtgtggtttggaactgaaataagaaaccttttccaaggcaacgttctgctggctcaggttgcatcttctggcctacgtgtattgggccacactttgtctgttcccaagtaaagtttatgaaaatggcacagatgcagccacacttgaggtgccactgaagctatgtgaagagcctgctacccttcaaacagaccaggcccaagcaaggtgccaagccatgtgagagtgcccagtccactgtgtaaatgtgacggcctttgatggtagtgtttgaaaagatacttagtagaaagttgcagagacccgggagcagccatttcacaaaagaaggcaaaaatacctttgagaagaaaggaatgtctgcctctgcactatgtatttgcttgtttgtttctccaaataccatctgttgcagactggggtgcatgacattttaggtaagtagcagatgaagatttatgaagctgggccctgaggtttcctctaaaatatttcttcaccttttaagtcaagacccaaaagtggggagagaagtaggagttggcagaacttgaaatatttaaactaatttagcaaagctcaggagtgttggagcttatctcgttatttaagttagataaggaggaaggggaatttgaaggataatgatagatcagtgtttaagaatacagccatcaggactgataatgttctggaatcccgggaccctcggattgtgcacgtagatgtaaattccatttgctctgagaacttttgaaaaagaaagtttttggttgatttcacagaaaagatttatggtgggcatatttgactttttcagtaaaaatagccccaaaacaccacccaaaatctgttaagacacttctcgtgaatgacctcttagatgtgaaatggaaatgggttttcttaaggaaaggccccttttgttaacaatgtttgcatgttacttatgactctccaggataaaaggactaagactcttttgggtcaccagagcctgaatgcagtcaggttggacaggtcagcaaaaagtctgcaaagaggccgggtgtggtggctcacgcctgtaatcccagcactttgggaggccgaggtgggcggatcacgaggtcaagagatcgagaccattctggccaacatgtcgaaaccctgtctctactaaaagtacaaaaattagctgggcgtggtggtgcgcgcctgtactcccagctacttgggaggctgaggcaggagaattgcttgaacccgggaggcggaggttgcagtgagccgagattgcgccactgcactccagcctggcgacagagcgagactccatctaaaaaaaaaaaaaaaatagtctgcaaagagaacttaggaaatgcttccattaactttttcatcctagctgggtaatactgcttttaattactctgctctgagagcagccatttcttatacttggtattacacataggacatcaaacagaattggcttgaattgagcctttagggaacttccaaaggtaaagattgagtaaagattcaaatgtttattaggatataccagtgttcatttttttcccactaatattccattcaaggcaggagactaggctgatatcccatgtatctagagtggatcaagtccaatatttctttcagagttcctgttccttaaaactgtaaatgggttttatattttattccatgtttggcttaataagaaaatatttttaattgctacctggtaaaattaacatttcagaaagatctgatatgttatcctgtggctcctgcctcatacttatctaggaagttccagcacgctccttccagatgagtccggtacgctgtagtagcatccatatagaggcatgtatatggtagaggtgaaaagctggaacttgtacctgtttgaccctaaggctctggttctaatctttgggcatatctgtcttttggcttggtgtaacatctgctgcttgggacagccattgtgttagttaacatgtcagtttcatcacgaaaaaggcattacatttcagtgaaactgaaaaattattgctatatccagctgaagggaagggactgtcaaatatctcctctgttgtccaaacatggcacagtagatatagtgacagtccctttatcttctactcacccttgcgtatatatttgtgaggtgagagccatatattctcacttcctgatcttgccaaaccaggtccttccagagaatgcttgaaggtagatgggtcattttctcattcctccctctacgtgagcaaccccagaagaacactaagacctgtgttgatgacattggatgtctcacttggctctgaaattaagctgatgaaattataggatcggatattttattttattttttttcaagacagagtcttgctctgtcgcccaggctggaatgcagtggcacaacctcggctcactgcatcctccacctcccgggttcaagcagttctcctgcctcagcctccaaagtagctgggatggcaggcgcacgccacctcgcccagctaattcttatatttttagtagagatggggtttcaccatgttggccaggccggtctcgaactcctgacctcatgatctgccgaccttggcctttcaaagtgttgggattacaggcgtgagccaccacacccagtcaggatcagatattttaaagaagcatcttaacagtccttcatgccttataagttaaaattcctctcacaggaacgtaagcagagaaatcttattttctgagacaggcttcttccctctcgctgaactctaaatactgtattcccctttcactcaaaggccccagacgatgccattctcattataacataacttatggaaagctcagatctattgttggaaaaaatgcaaagtgtgtgtgttcatgcacacacgtgtttgagaaaagcctttccatttctgaaatcccaagagtcatttttatgcaagattatctgttaggaaaaaacccacttttttggtcatggtacattataatcatttctagaaaggagagcgtctaatttttgccatttttggcatgcagagatgactgacttcatagaaaccacactatcctgcttccaaaagaaaaaaaaaaaacctactgaatttacatctgaatcaacatctcttcaaagtccagtccttgcatctcaaccagcaggtccttgtgcaaagaaaatgaatgggaagtgtgatttggggttattccatttactttctgatttggggttattccatttaaaaatgaaataatgttgccattatacatctgtagtcccttctgtgttcagtgaatttgtttttaaaactctaacgtgacacctaatattacatacataagataagacatttgagatttttggtttgaacttcaagaaaaaataaaacggtgtctatttctttttgagaaaaaatttgtattttgtgcattagagaaggttgaagagccatttgttatttgtggaactcctctgtaaaggcattggatttacttatttttagattttcatgactatcccatgcctcatgtttttcccttacagaatcatccacctttgcccaagataaaattgaaatctttaacaagaggacccaggtttgagttcagctcccctgctcccagagagctttagactgtaagataattctgagatacacacaggacatttggactagcagggacttaaagactcactgttgtattacagattatggctcggaagcactgagggaaggaaagataggtgtgggtgttataattcacccgtggttttcttgccctgatgtatttatctggtactcttttgccagtctccttctcaaagacattttcttgctaaatttcttactaacttgtcaaatggagggaaaataagattgaattagtaaaacattcttatcacaatatactctaaaagaggctgggcgcggtggctcacgcctgtaatcccaacactttgggaggctggggcgggtagatcatttgagctcacaagctcgagaccagcctgggcaacatagtgaaaccctgtctctataaaaatatacaaaaattacccgggtatggtggcacgcgcctgtggtcccagctactccagaggttgaggcaagaaaatcgcttgagcccaggaggtcaaggctgcagtgagctgagattgcaccactgcactccagcctgggtgatgggagtgaaaccctgtctcaaagaaaaaaaaaaaaacaaaaaacttttgttatattgggcttatataattcaaattaataatgttacttatctatatccttagtggatttactttaatacattgaggaaaccgctttctgattagcagagagaatttgtacatatgggttcttttagaacagagggtctcaaaatacggtctagggaccccctgcggaaccccagatccataacctaaaacctatttgtatatattcatgtacttatatatgaatttatagatataacaatttttataatagtattctctaatgagtatacagtggagttttccagaagctacacaatgtatgatattgtaacagattgactgtagaagcagataggtgaatacagctgttttccagttagcaagacttaagagatttacaaaaatgtgcaggtgccactctcctcaccttctgtgactctgcatacatgccaccagccaacaaacgtacctggttaatttttttgacaagctgctctagttgaaaatacagtgattgataatccatcatcttgctgataagtagcacatatcggcaatgatgggctaattcggactaaaccgtaggagccgctgtaatgcaatgcttccctttggcttcctgccaacagttgtcagccctcctggtttgctcctgacttttactgggtttctagaagtaacaattggaaatattttatcacatatcagaaagacctcttacaataatttacctaatttagttcttcaccttaacctaccatcccaataaattttaatttcggcagggtagtaagtgtagagcagattacttcaaagtgcagaatcttgtccaaaggctgcttggttgtgtttgcactgccctgactcttgcaggtactcgagaaggtgtatctgtttcagaattcacttgccaaaacctcaactttctcccctagcaaagttgctggagtaggataaacccacagtatttggataagctcctttgaactccttgtagaaagcagtttttatgaggcagttgttctgtgttaacaccagagacaattcctagcagatttccccaaacatacttcaaacatcgataatggcaggggtgacccaaactgtatcataaaatcccagggactgcaggagacttcaaaggggagacagagcaaaacctcacttctcgttatgaggagtatgggtcacaggaatcctggctagaatccatggtaacctcgcggagtaatgccaggatggacagaggccagggctcatcagttccctagactttactaattgaccccagcagcacagttagagtggtaataactggcacctgcccacctcctgaggtgttagaggccaaattaccacatgtgaagtgcttttctatcctttagtgagaagatgcaaaccttgaagtgtgtttctatttttgtttgaactatcgagggcccagttaattcagttgagccaattctgaccttgggatattcagatccatcacttagtatgtacaggcaaattgacagtagaaatttattgagtcttgaactcctactatatttcaggcatttaataagtattaaatactgggaatatttaaataattgaggacaaactgctctgaagaatcaccaagctgtttggtttgtgtgttaatattcttaagccactcttacgtgttcattaaagcaagtttccctatagttttcttgaagaactcattttttagtgatttgacttactctttattcttgaaaacaacaaaattgcatttgtgcatatggtatgtgttgaggggggtaattacaggcattttttccctcattaccgggtccgttacagctccttgaaaacaaatagttatagttttactaattgtttataaaattagctaatgatcctttgattttttagtttttttataccttagctgtatttaataaatatttagtatcttctgtgcaattaataagaacaatgggggccaggcatggtggctcaagcctgtaatcccaggactttgggaggctgaagtgggcagatcacctgaggccagagttcaagactagcctggccaacatgatgaaatcctgtctccactaaaaatacagaaatcagctgggcatagtggcacacgcctgtagtcccagctactcaggaggctgagacatgagaatcgcttgaacctaggaggcagaggttgcagtgagccgaaatcatgccactgcactccagcctgggtgacagagtaagactctgtctcaaaaaaagaagaagaacagtgtttaaaaacctgttatttttacctgaattattttgctacgacaaatttatctttcaaattagattttatcaaagtagatatgtattcacttttttaagttgaagtctttctaaatgtctaaaaccaaaacacagtaatctcctgccctacctttccctgattcctgctccctcagaggcaatcactttcaacactttgggctgtttcttcaatgtggaggtatttacctttatatttcataaataaaccaactgctatttcttgacatcatttgacttcatgttgttatacatacatgtttcctttccccatttttcagtacagttatatgatcctttttgaataacttagtattccatttttacgttattatgactgtgtaaatagtattcccagtgaagccccccacccaggtcactttgatgatgtttcctttttaaatgttgtgctttgtttttttctccttggagttagtaactgctctttcagtattgtctgctttgttttctatatgcacattcgtaatttattctcaaatgcttatttagtttccacatttttttaaccctgggcctagtaactcgtttttctttaaaaaagaaaaaaaaaattttatgttcctattgctaatttatccacaaacactcttctgtatgtgtacaaatgcactgagtaatttattggtttctaattaaattctccctcttgatgtcctctgctcccatctgactggttgttgtctagctatttttgtctctaagctatttttctatagtagtactatagcagtactattctgagtttctttcttccatttatttgttttggtctttttctttcatgaatagagacagtccccagagaatctggtgattcttgactatctgttctactcctctttaaagatgaggcactaaaaagccaattgggagctcttggtttgaggctgagggggccttactgtggaatgatcaagtggggacctgctgactctgggctcctgttgagaggagcaaaactgaatggggatgagagaggggacctgaagctctaactgcttcccatgcagccttttaaccaatcttcctgttttcacctcactccaggcctatctgtttctcctttatgctccaggccttcagagctacttgctgcctccatctttctgaaatgcagtggaggccaccatcctaattagctttctgctttgtggcttccactccctcaaggcttacatttcagcgccacgtgtccatctgcttttcagcttctaaaatattgttgacaccttctctttatccttttggatttgtgccatttgtatccctttgctttccctttagaggggtctctggactagatctgtcatgtttaatcagaagtcctataatttagacttttcactaatttgtgtttcctttcttggtgttctttcccctttacccccaactagtggctctgaattagtgtggttttatgaaacccatatccattcagccatggttctatgtattatctcatttaggcatcacagcagcttttgcacagcatctgctcaggcagtctgtggctcttctttccccgaaagattgagaatacatctggtgagaagccgttgccagtcccagcccctgctttgagtctggtattggtctttaatctctcattctgtgtgttgtaaagaaacaggttgtggaaggctcttgtcagatcccaggaacatgaaagaaatagcacaccctacggtagtgacatggccctgtcaccacccctcattgaaccataaaagctattcagaggggccagcagctggggagcgactgtacttagatcctgggtgctgatgggtgttttgtagtttccaagggaagttgctgaaagttttcttatcttgacactccaagggcaagaggtctttcttcaaagagaagcgcttgtttcagaaaaagatgtggaaaggacgtaaaatcacaggttcttccccagttctgaaaaagaaataggaaggggcaacgtggcagtcagtgtgaaaagaaaccacgcatttgcaggaagcaagaaggggttccgcagcactggctgcttccggcatctgcagtgcgagggtaaacaggcctactggggagtcggttggccctgggtttgagtcattgggctgctgcttggctgtgacctggaacaagtttttcccctcttaatctctctgagatgagattcctttgagtcatatgcctacctcggtgggtggttacgtggattaaattatatcatgtatataaagcactcagcctggcatgtggcatgcaggtagggctcaagaaatggtgtcagtgtgaatattctcccctgaatgttggaatgttgtgtgaaggtgaaacagggattgtgtccctagctcttacttaaattcaaccctgtccccgaattcttgctgaccacctgctagagtgtgaggactaggagttcatgtgcttggctgggcttttgtccttcccattctctttcttcacacaaaatgaacagttgaactcaggccaccaaacctggttgagttgctgggtggagggactctcctgggctctgagcctttgtgtgtgggaaccgcactggaaaaggtgtgcagaggccacgaacttgctctgaacccacttgtgaagagcaggtgaccccaaactattgttagtgtctgctgtaaatgatatgcctctgggttcgagcagagttcagccaaaagccccacatgacatggaaatctgtcctggagccaggtttgtcgggtaaaagttatgtagcaaatgtctccaaacattggcatctgttgtctgccgagactaggacaaccgagaatgatggagtgcttaaggaaattaggatggggcatgcgaccctgtaacagctgataaactgtttcaggccaccgtggctcatccagctcttttgataaacagctttaaaagcattacgtggtttggaaagcattcttcaaaaatggttatattttccagacgcatgacagtccactgttcagtattatttaagggttttaaattgtagaatcagattccttttcagtggggctcttggaactgtcgagggctgatctgtctgactcccaccaggacaatctcacaacaatattattatgtaggtcggggtcccctaggtctgttaaaaaaaaaaaagttcagggctaagcgtttaagaggaaaaactatttctttcatttctagctaagtctgatgggccctttcaaacactgctttcatcatgcaccttttatttcacgatttctgcataatgaaaatacaagatcgataactgtggattatcgtaatgccttgagcctttgaaaatgaacattttctagattataaatgttccctttgtaattcatttcaaacttcatcctcccatttgtcctaattcccgaaatttaactgttgccttttgagcctcctaggaaattctgggtatcctttaggcaagggaggtagctcttgggggaatagcattcaggccacaggcaattcatttgcgacttgggctcttcttagaacatatgataagtacaacgcactgtagtgacagattttttaaaaaccctattaaagcccaatatactaatgcagattttttttttttaagttttagagagattcatgggattttattctttttcccaaaggcagtggtggagctgacagagtagcatggagcctcgtcctgatgtattgtgcggaagtggcagcagttcacattcattcagtttgtcagcataggatcagttccttcttgactcaactctctgtgatcaaaataagctattggatgttccctttgggtactggaagcagcttggccccttggcaagagaacaggattgcaaatcacaagagcagagccctgactccagctctgatgctactgtgctttgtgaccttgtgcagacagctttatatccccatctcaggtcattctcccccatacaaagggggagagggtcatccttgccctggtcatgtctgcatggctgaggtgaataactagttgtgtaacttcctggaggagtggcacagaggaagctcccttcctagggctggctctgccatcagggaggaagctggatattagaatgaagaaaaagcccatgcagaatatatggcagcccgataatggattctaaaaataaaaaagcactaggttaatctgcagctgtagtgtacctaaagtattctttggcaggttgtggccctagcctaatccccagctggacttagcaccatttaagtgagttacatctcatccccgcaagggattgagtctgtagccaatttggccttgtcaccacttcagccctccctctgatttcacctttgggaaaactacaaagtggccccagacatacatagcaggcttgatcacatgggtggagtctgtcaggacagcatacatcaaataaaatgtccagggaacctgttgtaaataaaccacttcccgcatgctcagtcatcgtggaggtacttgaatgtttagtttcttttagctgatggccaagaaatcaatgtttaaaaaaaaaaaaacaaaaaacaaaaaaacaccttgacagaggcattttgtacaagaatggtgtgtgggtgtgaaaaagtaaattccaaaacatatttccttttagttcccaaacccatattagatgagtacttcttagccttggccacagtgctagagtaaatagcagtgtcacatagctcgtggaacaggcaaaccacagaatgtacaagagagaagcgtgcacaccagtgagtctgctatggcagctctctttgtcctggtttctacatctcatttgtaagcaacttgtgttcctgcattttcagagtttggccagtttatttacttagaattgcatgttcctggaatattgtcataaaagtgatcctgagatagaaaaagtcaacaggaagcaggggcattgagtttataagttctcagtctgtcttggcccatattaaagtctcattctcaggggtaggtccagctttccaaattttaatatatcagagactcctgatgcatctgggctcatgatgggccaaagtaggccttcaggagtcctcgtgttacacactcaacgcctaatggagactggattcatttacgtgtattaatgtaacctgcgtgatcatgtgagtgcaagtgctttgtagattgtcctgggagatgtggcatattatgactaaagacttaattgaaccctgaacatgtatatgaataactggagacagattgactggattacacatttttcttgaaaatttcctaaatttagcctacctctttgttgccttttatttcccagcttaagtggttctctataacactatattttaaacaaaccagaacaaatagtatacaaaagcatagacaagagggatataacaagagatggttttctgtgatccgtggcacctcctctctaccctgcctccaccaccaaaaggggctttaaattaagattcggaatggcaaattcacttaccagctccaaacacagtagacaaggaaaccttgtgaggaaaatccgagagtatatttacagtttctgttcagaaatacatagcttaacttcgaaggaggaagcgtgacttttcacctgcagatagaactagggtctgatttgaaacagaccactggcttcactgaaccccatcaaagaagtctgcttctgcccggaattggaaagtgccagtgggcatgtagttgctagtatgggatttctgtttttatttttaacaagcttgggcccaactcttagtatcaagatgggtgaagacaaaactgaccagaaaaacacgtatcaagtcagcagtggctcacccctcagaggccatttttcccacctgctcctcttatacctttggtttgtttttggttttggattttttctctatgttcctcctactctttctttctctattttgcttgggccttcgttagaagagttctagtaatcatttcagacttccaaaattcaacccagtagcctcattttacaggtggacccactaatacacaacagctcgatgtgacaaaccatagactcacagttaatcacttggagagcctggattcacctccgcgatgacctgcctttccagccctccagtggcgtcctctgtagtgagttgtaaatgtgccactctagaacattccaggaaagccctcctcttgggctaaactctaaaactaaaatgaagtcctgcccatgtgagctgcttgtttaacactttggatgctaatcagagcattaatgagaacacatggatagattcggcaggtctaatgcttgggaccttctcctatttgattccataagactaaatcccctataaacacttccctcctgtgcacacacacatgcattcacatacagcactcacgtatccctcccttatagccaaagaccgaaaaataaattttttttttctacattaaaaataagaccagctagtaaccagggttggcattcccatctcctgtggaacctggaaggactagcagatagctatagagatctgtctcctttttagtgtggttgtattaagggcaatcttgcctcccatggcaccccagaaaatccaggagttcaagtgggggtgcactgtaggaggactcagcagctgttttatggaaggttcgtcagggatcagactgaagattttgcttttgtgagaacaaagtgaaatgtgacattcaggagcagctcggggcctatatataggggcccagggcctgctgggatggggttttacacttgggctgtccttttgcccttcccctgaactcttttcacttcagtcatgagcaaacagtcagtgcctgaactaacaaccctgtagtcctccgaagcacggctggcttacagtaccgaacaaagggagggagtgccgcgtgggccggcccaggccgaggaatgcggcttcagggttctgctccataaatttaaccagcacgacgaaaaggagataatatgagccttcgtgatgatctgaaagggggaggttctgtgtcccattgattgcggtctggcccaatgccaggcccaagcctgaccgacagttgaaccatatcattaaggcgtgtaatacagctcgagtcttgtactgccgccaatgagtgcatatccacagggcaaaagtttataaagagtcgaggctgtcctgtttaaccctctcacactgcatgtaatagaaccagctgccattcagaacttgcccatctgaggtcataaaggaaagcctgcacgtttcttttcttcaaacagcttttcaggactggggagaggaagaaacgctgtctagagagggtcaaggcacggtgatgtttctctctggagaagcaaagcagtctgcctccctccccccggccagaaacgggacaccttagtgctttcttcagagtagctctctgtttgtggtataatgttgctggaggaaacagggctgacaccacaggaaacctgcctgtctccaaggaggccgcatcggtggcagaggtgggtcagatgccggccgtggagtgctcttgtcaagcttgggatgatgccgttttccttccccatcacctcgaaagctgttaatagccttgctttctggccttccacagctacgcccaggtgctaaaacagagcaggtggaaggccgccccacggagtggcctgtgagcccagagttctcactgtccgaggccggtggccccatgggaactctgtccattcaatagggagggcatgtagaaataggcacattgtcacagcaaggcctggagtggcctgggttcttacagtgggcactgcattgaggaaatgggcagacaaacaaggatttagcataagtatagtcagaaagaaagggctgcctgtgttcaaaggacaaaaggaagaaagtgggcgaaggggtagtttagtcctgtccatcagccagtcacgttctttggccaaactcgggacctgcctgtgctttgtccatggtgtccaggaagaaatctgtgtctgtcacttccagattgctgcttgtctgcaatggacaatgcctcttaggcagacacctgctcgggatgacagtgctgcagaaattgatccaaaacattgactagcttgcatggtatcgctgtcattagtattcagtcttcacaaccaccctatgaggtgggtgctatactttccccattgtacagatgggaaagttgaggcacacaggggatacgtaacttgtctaagatctcagaggtagtaaggaagggtaccagaatgtggaccctggccaactgaacacagagtacatgctcctaatctctgtgctgcttctgggccatctctcggtccctcacatcgaaagacctcatgatttcaatccaaagcatctgaccaagtgttaggtctacttcctttcgattcttggatatgaagggtaggagcttaatatctgcctatagcccagaagatttgtgcaaagaccctggttcacttggagaggaggtactataaaatttggaccccacaatgcgaatgaagggtatgtattgaattccctcagcccaccagcttaacacagagacagtgtgagggatatactatagctgggaagcttggaagggctcatgttcaagggcctctttgggccaaacagcagtgggcctgagcatggagagaccctggccttttagtgccagtgcctagagaagcaggtcactaagctttgtgcccaggagctgtgctgtccctggtccatccctgtgtaccccattccactcctgaaataatgaactactgcagccttccaagttcacagtgtgccagtttgtcacagaatagcagtgacacttctctgctgcaacccatctttgctctgccatgctgccaagaccatcttcaccaggcggtaacctgggaactccagctggtacacagtacaagaagcctccgcagtagactgtcccaggtgcatgtgctcagtatgtcatagccatctccttttggaggccagggagagcttctgtttgggtgccacggatcctggacagaagctttctagaggtaggagaagagactaaatggctggccaacccagagattgttggattgtgttatgattccatggtcaaagtgctttaaaaacctagaaattggctctggtagtgagtcccaggatggagctaacttacgatctggactccattacatgattgctaatcctgaagttcagcaaacgttggtactggctgacttttaatggagtacctgtttgagggttctcctcatcatgtatttaaggttaaattgtataaaggaattctgctgctcttttgaaattttctggttctgtttaaccatacctaaaaatgccatgaggtagccagatgattgactaactgggatttatggaaattcttatctgcaaaaatctcaagacaaagagggcactaactagaaggttcccagtgctttatgtaacatgcagaaggaagtctggtctcagcttcttggatctgagcaatcctttggaaagggagcaatgaagagcagtaactgaagactcatttcctgccttctgtgtgactcactctcctttgtcaacttcaagtttgccctaggcctgcttgcttctctccaccccaaggaacttggtctttggaagacacaggcacctgccctctctgtctgccttttgcccccaggtccagagggagaaacaaaccctcagttggaggaaagtctagagcacaggctttgtgttgctcagagaagcatgacaggaagtggtgctgttgcctctgcattggccgactcctggctgcacctgcttttcccagaggcacggggaggcccaggcaggggcccagggcctgctgctgatcagtttgtcctgcttgcaagtctgcatcccagtacccaacggggccaagtagaaaaggcacatagtgtagtgtgagccgtagctgtcaccagatgggtctttcccctccgtgcccaaccccttccctgacctgaaagggcctagcctctttccccactggcttccaccaagttctaacacattttatatatatcgatttccaggcttgtagaggcaagacctacagtccaggagttcaaatggattcagtgttgttggttcttgtttcctagaaggacaagtgctctgaaggtttggtgtcaactctgacccaaggggtgtatctgatttttatgaaggcacagaaatgcacctgaggtgaccccaagtccttctcttttattttttgatttcccaccacctggatcattaattctgctttcaagggggatggggaaaggagaacatttcaaagcaaagttgatttggtctctgaaccagcttgtcttctaggctgtagttcaccctgatgagaatcagaaaggacagtctgtaaaccccttcactctagtgactctgcagctggggagcctcaaaaccagttccagatgttctctctccctatattggccagaagggaatttcgggcaagcaaggaggcagagagcttttgcccattcattgagtacccctgtctgcaaactgtgtcttgcttcatggcactttagggagagtgctgagcacctgggtccatttgggaccagccagcccttcctgttcctcggttagaggcatgctgctccaagctggctggttactgcaagcaagagaagcccgccttcctgctgttcagggtcagaaagcaagaccgtgctggagaagtaagtcaggcaggctaggaaggagacctgcagatgacccttgggttaacaaagcaactttcacggccctgttcaccaccagctaggatagtacagggctttgcctcccaatcttgggagacgaggcatagatagtaatggtcaactgatggccctttactcttgagaaactccacccagcctccccttatccagaagaaagccattcctgactaagcctggccattctgacgccttctttcttagtctgcacccagcctgtgctgtatgcggtatatgatggtagaaatttgcactcttcatgctttgattttaaatgcatattagacattttggcatttgtgcctgaatgctctctgtatcatcttttttaaaacatagtttgattatgtaagttaaagaatgtacaaatgtaaacttctgaaaatacatacaatatatgatttcttagagtgtatggacactgctccagaggccttgcatgaattatctctttaatccttacaaaacgaatgtgatgggtactattattcccacttcaaagaagaaaataaaaaggacttattctccctgggcattgacaagcaaagagattaataatggtaaccccaccagacatctctatgggtatatatgtgtatatacactagtatacatatatgtatacatagtatacatatatgtatacatagtatacatatatatatactagtatatatatatgatttgacatgaatgggagtacatatgttgatgtctaatctttttcactccacaatggtgctagaacgtctttccattccaaaaatcatttttaacatttacataatattataatacaaatattccataagctacttaactagttccccattgatggatgtttttaatttgttgctgttgtaagcatcctctacatatatcccatcttacttgaataattctctccttaggctaaagtcctaaaactatgattgctggatttaagggtgtgtatattttctgctttgaaacacattgtgaattgccttctagggagttgaaacaatttgtactcccacccacagtgtgtgagaggactgactcctccagccgtgtaccagctctggctattcattcattcagaattcagtcaagaattacatgaagtagctgcagtgtgccagatactgtactcagaaccaggcattgttactcttttaagtctttgccaatctgaaagagtgagtatctgtgttactacttgcatttctttgagaattagaagcgttgaaacatcttttcgtgtttcagttggccatttggatttttcttcttttgtgaattacattgcgtattctttgcttcaatctttttaaacccgttaaggtcagaatttgtctttttagtgtgtggtttttttttaattcttatctagtgttggtctaacccttccaacagttgtcatttagccagtttgtcatccatgtaagtacatatctttcttccagatattaacaaagtttatatcagtctcttggtgaattccgttcctgtaagttagaatctgcatcatgactttataaaagaccatcactgtgcctacagttctttaggaatcgctttggcattaagaatgaggcttcagccaggcacggtggctcacgcctgtaatcccagcactttgggaggccgaggtgggcggatcacgaggtcaggagttcgagaccagcctgaccaacatggtgaaaccccgtctctactaaaaatacaaaaattacctgggtgtggtggcgcacccctgtaatcccagctactcaggaggctgaggcaggagaatcacttgaacccgggatgtggaggttgcagtgagccgagatggtgccactgcactccagctgggcaacagagtgggactccctctcaaaaaaaaaaaaataaaaataagaatgaggcttcagccagatgtttttggattatatgtggcgtggcctattacatggtttttatttttgtttcctcctatttcttagtatttctttccaccagttcctgttgtaaaacgtgaccagttggtactgatgctgtacatccttgtattagtaaaaatcctgctgtgcctggaggcagggacctgcttgggccaggccttcccaggaagcccgtcctaccctctgtagcatatagtgccggaccaccccagcgctcccacttacctccttcactctttcattgttgatacatgggctaggtttcctacagagtcacttcaaggatgtagatcttatcctcccaattggattgtgagtttgttgttattgccttttttggtattcctcaaggatgttcagaatacctcacatagtgatggactcagagtacctattaaagagattttcattaaaatcacaccattcagtaagttgaccaagtacatcaagagagtcagaaagacccaagatctagtttggctttgccaggcatagcttcctcatccataaaatgaaatactagtaagatacttccttatgtgaatcttgggaggctcggagtgtccagtacacattcagcactcagtcagtgcagctgtagagacatagcgtggaccttggtggcccagcagtctcaatcctggtttcttctgacctaagattggtgggaaagtacagataaaagctggttgaggaggtgttgatagcacagagtgtttttacggagtgtcctcggagggttacatgctcctttttgttgaatccgaatctttttttttttctaatatggagcctcataatcattcaaggactcagtgtgatgccacaggtttcaaacttgccagttcgtctcttatgttctgccaattttttaaaagtgggaatatgagtgcatgtgcacgtgtacacacacgtgtgtgtgtgtgtgtctttgtgtatgtaaaatgcttgggataaaaaaagatggatcaaattttgtctggcatggcatagcaactctcacctctagtatcctctaaacatttaaccaaatggactttaactggtttacttcaattctatttttattttcgtagtcatttaaatgtatggggagccaactctttcaaatgagacattttgtcattaaaacatgttatttagtttaaccgcatgggcccggcttcagcaacattgaggactgtgaagagggttctgagcggctgttctctcctgacctgaccgcagcagtgacccaccagcttgcaatgcacgcaaactgaaacaggcaggatggccagcccagggttgtctgcacggtggtcttggcatctgtaccttaggttgccagctcctggccctccttgcctgcatttggtggcccttggccctgccgtgtcatatggcacaagagcccttctggcccgcatcaccctgtgtactgattaggcaggaatcagcaaatccgttgagtgcatgtttaatgtgacacagatgtgggacatactacagatctttctgctttacaaattttcagctttttgcatttcatcagtgttgcttattatttacagaatgtaacttgagacatcagaacagattgtaatttttaaaaaggttgttgggggggtgggcccgcaggggatctgggagaaaaaatccagtagtgtggaatgttgtttgctgtccagaccaaacaaaccagtttgccaagggttgatggactatgacaatcagtccaattcatgttaacactgggggcacttaattaaaaggcagcttgacctccttatcaccaaataaagaataatcttttgttaccaggttgaccgtcgcagcaccaggcagaaatgtaccccttgtagaggcactgaagggtaccaccaagctgccagctcgtgtcctgcctccttcctgtccacagagaaaggcaccattgaacccagtccccactcagacatgtggatattcttgcctcatgcctgctgtggctttacacccaggcgctatggcaagaggcggaaaaaagaaatctcttcctttgcccaaaaatccaagatactcttgagggcattggaatgatgagccaggccagtttgacacaagttcaaggagaaggtaccatctcttgcttctagaggggcacatctggctagaggtggccctggcttctgagaaagctcagccataggttacatttaagggcaaacaatgaaaagcaccagctggtcgggaggaagatgaggaggagtgggtgattggttgcttctttcctgtgtctagttctaaagaacttaaaacttgggtccaaaataatgagagccgtgttgtaaaaatcatttgaagagagttctcctggggaatgtgagctagtgccgtgacctgatcccttggtcagatggttctgagctgtttaagtgctgagtgtcaactgtctacagggagccaggcccctgaggagcggccagggttccaagccccactgttcttttccttcctggaaaagtgcagacggtgcacgttccccggaggccaccaggcagctctccagttgccctctgggtgaacgtgacccaggtcggtaactttctagtgtcccccccacgttggaatgatcagcattcctgtactccaggggttcttgagttcttgagttgttaccaacgccctgcctttctctggctcagattcagaggaggagttccactgcggactgccgcttcttcaccctctgggcttcggaagcagcacctctggctcccctgcacccagtcctcagtcttgtggccctggtctgcccctttatcacatgtcttgagcaccctctcagcacacagcaccgttctgagcgctgaggtgcgaccatgcatagaagagacaagaatccctggttccgcatggcttccctcaacacctacgtttccaggccatggcttgggttcagaagaatcaccctccctggaagagatgagtgactggaaggagagcatgtcactggctcccctgagaccctcccaagagcctcagtttctccctctaccacctgaagtctaactgcagggcctgaaacagattctctttaaaaacccatgagtgtggtgactgcataggttttcattctcctgagttcttaatttccgtgtccctagcactttttgaagcatctgctcctgttgcccctttcttttcctcctcaccctcctccatagtctctgtttgatagtagaaggagatttaaaacctccaggctgagtgaacaggcggtcttgaaaaagcaaacaaatcgggtcaggcacggtggctcacgcctgtaatccccagcactttgggaggccgaggtgggcggatcacaaggtcaggagttcgagaccagcctggccaatatggtgaaaccccgtctctactaaaaatacaaaaaaattagccgggcatggtgccgtatacctgtaatcccagctacttgggaggctgaggcaggagaattgcttgaacccaggaggtggaggttgcagtgagccgagatcacaccactacactgcagcctgggcgacagagcgagattccatctcaaaaaaaaaaaaaaagcaaacaaatcacaaagcaggtcccctctgggggctggagcatcctcatatctgcttggctttggtcactgaaagaggccctgggggagggggcttcagggcttcccaggggagaggtgacagttaggacacacgcctcccccacttcagtcaaggcagcttcattgtcagcggttgtacgtactaagattgtgttacaaacttcatttgcagaaagtgttttacccctgaaatttttttttgaaagcgcctgctgtgagttttattaatggcacttttctaaaacttcattaatttcaattatgagaatttgatatctggtgtaattcattgagctgctagtttgatttgctctagctcgttttaaaaagctctgtcaggcaacaggatatggatgggagtgggtcaggtgagtgaaaacgttttaagcactcctttcttcagaaaacacctctgtacccacatggggtgtgctcctcaggagtcattcagacaggtccaggagaacttgtcccccagggtgctccgtccagatacaattttaaatactgcactttcgcattttggtattttcaatggacttgacacccaataattctgaataaaggtaggaaagagggagatgattaacttttacaagtacctactatgtgccaggcactatgctacacattcttcatattttatctcaacattatcaaccaagtaggtattaagttctcacctattgatgaggaatctgaggctaagaacaatctagtaacttcttcagtgtcacccagctaataagtgactgggatttcagcctgtgtttgtctttttccagtctatgtttgttcctttatactactttgttcttaaatttcatctcttctcttaaaagaggtcaactttgggagaaggtagataatatataaacattgaaagaaaaagattatataatcatttgccagaaataaatctgaaaatattgggctggacacggtggcccacacctgcaatcccagcactttcagaggctaaggcaggaaaatcatttgaaccaaaaaaaaaaaaaaaaaaaaaagtagtgaaaatgtatggtttattaatgtaatcagcttgttattattagcatgcgtacttaatagccacaaaataaagcttaccagagatggtgtatttcggtccttgtgaaatatcttgggattggcattagaggtgacaggttagcaaggaatttgataatggcttgagagattccaataagcactacactctctgactcagaatgttctacttagaacacaaagaaagcttacaattgtaaagcgccttgttcttccatgatgttgaaagttgcaaaccactttataggttgtctactattttgtaaaagcaaagcaaacccagaatgcatgcaaaaattatggcctttaaagaaatccaagccttttaggctccattcttactataacatgatctattttcttggaattctttataaagtaactctgcccctccccacccagccattaacaggtagtctcgcccctgaggcagttgactaagaaaaaaaatctggagtatttttgtcttagagtttaaatcccaataggtgtatctgttggcattagtcctaccagctgtcacagttgcagtgtcatggggtccccaaaacatgtgttaaattatgggaagccttgacccctataaacaagtcaggtgtgaatcccactgatgggagaaaacccagcccaggaaatgtcatccctgctgctggatgtcaaattgctaaaaacttaacaatatcaatataatttctaatgatttcttgaatcaacatctttcttacattttcaatggcaatagtacaacatgggattttatgtgtgttatgcatgtatgacttgagaactctagggagaggtaagtagaatgttaacaagaaagcaaaggggaaaggaaaatacttcagtttgaagcagtgagcctccccagtaggaaaactaagtacaagaggttggatgttacaccctagcccatcttagatcccagacacctcaactagggttcctcgtgtgcacccatggcactctaaataatacactaataaaaagaataggtagcattttatcgagtgcctattatgtgctagactctgttctaagcactgtacatgtattgacttatctactcctcacaacaacccatcattacccccactttatagatgagaaaaccatcgctccaagaagtcacataatttgcctgtggttacagttcgtaagtggtggagctgggattcaaacccactgggcaggctggctccagagccgatcctctcagccattatattatgctgcctactctagtgctccctgtctctcctactgcttccctgctgtgttcttgttgccatttctgttcatctcctccactgaattgctgtaagctccctggatacttaattcatcccagtcttcttcaggacctagtgctggcctctgcatatgatagtttgggaaaggttggttgaataggggactggaggaggcaggcacaaaccatttgcagggctctaagtaggctcgtttttctggctaccctagtttggatccttagtcagtaattccatttaagaaccaatctctactagcatagggtttctttctgcccaacctattttccatgtgtccaaaatccaaattgtcccaacctacggattgaatactatctttgagtgggttctagaaggtgtatttctctttctcttgaaaccttggggaagaatttctcatgtaaacagaggcaaactttagaaattttcatcctctaatagagtcttctctgattacagtttgcactgaaaggagtaaaatctgtttatggagaagaaatgcttttccacttcgtctttagaagtagatgcatgtggccaagaggagggagctacacgtcagaggtagttgcagcctatggcatgatgggagctacaggtccgagatagatgcagcccacagcatggtgggagctacagatctgagatagatgcagcccatggcatggtgggagctacaggtctgagatagatgcagcccacggcctggtgggagctacaggtccaagatagatgaagcccacggcatggtgggagctacaggtccgagatagatgcagcccacggcatggtgggagctacaggtccaagacagatgcagcccatggcatggtgggagctacaggtccaagacagatgcagcccacggcatggtgggcttcttgggcttgcagacattgtactgctgtggataccagagggtttttcaccaattcgtctactctactgcagacagtactatttagacagactgcggggtttctcttagagaaatgacaaatgtttgattaggccatttggtcaagaaccctggtatcttgtagctgttatcagtgaccagtattggaagaggtagtctggattgaccttcgttctcagtctaattgtgcacactcgagcacagtatatatcagtaagatacttgattaaaacaaaagccctggacacatacataaagtgaatgcaagcacaacccatcacacaacccttaaggaagatggcagccatcagttgaataaacattctatgatgctaacgtcacatgtgtgacatacactttctactcacttactgattgtttttgaacatcacttggctgatagacattggccatgacagacttctcaaccaaattaagctgtgtaggggtatgtgtatgtgtgcacagcatctgtcttaactaacagacctatgacatagttactcatcgtataagctacgaataattaatgcctggctaaatgttgactttcaggctgaaaggcaagatcaaccaagtggaattggctggatctccctgtgtcaccttgtttggatttactgttgattttttttttaaaagacatgagttgttactactctgatcattggttttgggcctccggtgtatatcagatagcaatggccagatgcaggcacactctgtattgattgccctcactggaaggatatctgcagtgtatcagccactgtatccacagccccttccctgggggaagagtcctccatgctgtacagcagactccctgacattttcatagagttcaaagctcaagttggtttggtgctgacattctggattagctggttgactggaaggactgcttctttctatacactgtgaaatttgtaaaccgcagcagctgagggcttaacatggccgacaagctccagctggcagcaattaaatataccgcagacctttggccaaacaaaggtttgtggaggcagagttgctgcatgtgcgctgaacagactcctaggttgagtgttggttcataagagatgctgtcgactaaggagaggtgagtgggtggattttggccacctcttgttcggtgatccattgtccccagaattattgtatcaagaccctgcccaagtagcagcaaaggtggtcagaggaaaggaacaaagccaccagggaggccgcaggcctaacagtggtgggcctgagtcgtttagacgttgatctgctgctgtagcaccaatggcaggatctgcagctactccacttttttaaatttattaatttatgtatttattgggtaccactatgctgtaggctataggctgaaaggagaagatgggaatgaaaaaacaataagaagacatttaatatccattcaagcagcaaagattcaagagtctagaccagtgctatccaaaatacaatttaaatttaaaattcagtcctttagttacactggccacatttcacatgctcagtagccacacgtggtcagtagctatgtattggacagtgctgtcctagacaataccaagtgttggatatagatcgctagggccccttaaatgcctcattggcaggaatgtaaaaatggttcagccacttcgaacgcagtttggattatcttgttaagtgaacgtttatatcttgtgagccagcaaattccccctagatagattctcaaagttcaccaggaaacacgtacaggaatgttcataatagcatcatttgtaatagcagaacctggaagaaacccatgtgccatcaacaggaagatggatatatcatgggatagtcatacaatggaatatgaacaaagcagagacatggtgaattaatcatggctacacacaaaagaatacctgaatcttagcaatgtgacagcgacatcctttttcaaaagcccaaaactaaacccaaagaacataacaagaatgtactggagcatcctttgaaatgtggtaaggctacataaaaaagaaaagcacaggaatgagaaacacaagattcagaacagcggctgccttagttaaaggaggaacagggatttggggtggcagaagaccaacttgtggtccacgattgagtgatggagtttttttttttttgctttcacagatgtttatttcaaataaataaagagagcccaatgatgagagtgggccttgaactgaggataataagcccagtcctaaagaccagttattaaaaaaaaaaaaaaaaaaggactggccgggtgcggtggctcacgcctgtaatgccagcactttgggaggccgaggcgggtggatcacgaggtcaggagaccatcgtggctaacacggtgaaaccccgtctctaataaaaatataaaaaaattagctgggcatggtggcgggcgcctctaatcccagctactcgggaggctgaggcaggagaatggcatgaacctgggaggcagagcttgcagtgagccaagattgcaccattgcactccagcctgggtgacagagcgagactccatctcaaaaaaaaaaaaaaaaaaagactagagtcctttccctccaggtgctcataggcttactggaacatacaggaaagtcacttaaaaatggacacactgtcactgagcatgaacaaatgtaggactgctgttacatggtcatactcgtttaaaaggcctacttgaacgtacagtgtcacatcaacagatgaagaaaacagcgtcgtcacacagtggcctgggctgaagaacttcactttaaactttttgctggcttacgaggtttgaaaacactagcttactgttagctttttacattattttagtaattctttaagattggaactaaatttgttcatatgcagtgacttcaaatactctccccctacccacagcctaccaacttggacctgagaaggtaaatttttagttgagttttagagaagaaagaagagtttttcaggcactgacattgatgaggtgatacaggagtggggggaaaattcctttaatccagctttctgcttctaggaagagtatgccttctggaagtccttgtattcataagactgtaacagaagatgtttccttttagggtaaaattgaactcatctgtcttttcttccatgttgatgtgaaaaattagccttgaatgccacagtgagctcccctagtcagcagtgttgagcactgaatccaaccttgcccttgatattatttgatcaaaagtcaagaaccctggaaatgggaagatagtttgtggcctgttgtgaagacagtcaagaaaagaaacataatgatagtcagtgtgtatcctcaggggagccactctgcttttgtattctctgatgttttggtgggtttgcagtttacaggttaaaaaataatgtattgggagtgggggtgaggttggatcactgaaacctgggtaaggctctgagggagtccactgagtcaggaaataactgtttacactagaaagctgtttgatcgtgtgagaagatcaacaaggtgagccctttactcccattctcaactattctggagctgtcatgagattaaatttttaagagctcgggtccagaaacaagccatctttcgttggcttctctggcttcctcggatccaccagaggcatttaggacttcagcaagttttctcctgcctggtagcatgttttccctcagctttgagtactaatgaaaatcctgcttcatgtaagggaaaggcctgtcatcagtgtccgcttcaggacactgccgtcatgtccctttctgtgttttgatcagtggggcagacagagacagccttgtcctttctgtcaggaagatggggttctagctgcttcatattttgcctcaatgttgattttgctttcagggctcaaaatccttagtcttcaaactctccaccaaagcttgcatactggccttcctgtttagctcaattaatggcccttataccgtctgccagccaccaggcactcactcgtttattcggcttatcctgactgctgctctaccataaaccagacactgttctccatcccaggaatgcagtgaatgaaacaaattccccctctcctggagcttccagtccacatgggagccaagcagtaaataacatgtttatccacctgggatggaaagcaaatgtgctttgagcagatgactgacttgatgtaacttaccttttttttttttttttttgagacagagtcttgctctgtcgcccaggctggagtgcagtggcaggatctcggctcactgcaagctccgcctcccaggttcatgccattctcctgcctcagcctcctgaatagctgggactacaggcgcccgccactcccccgcccaccccagctaattttttgtatttttagtagtatttttagtttcaccgtgttagccaggatgatcttgatctcctgaccctgtgatccatccgcctcggcctcccaaagtgctgggattacaggcgtgagccactgcgcccggccgatgtaacatcttttgaaagggccattctcattgccatgaggagagtggacaaggatggaaggaaagagaacaaattatgagactactgtaataatatattacaaatccagggatcctttgttagttatgatcgagatggagaaatagtcagatttgggatatatattgaatttgagcctgcaggcctcccagttgattggggaagatatgttgagacgagtctgaatcaaaccttacgttgaaagtgatgaggaagcagaccctgccatattcctcttggagagcctttgggcttctaccatgtagcctgacagagaggtcagcaggactgccctggggaaaggatactttattagcctgtgtaggcagttattggaatgacagcaagtgctttgctaggcaaggagataagaacagagctctgctacgtggagaggcacgccaagctccttcccccaaccccgctgcctgcagaggttaccagcatcctctcggcagcagtcgtccagcttctctcctgatgggttagcagcggcccctctaccgccctccccactttcgatcgatatttgggctctgagtagccaactgtaagcctgcgtcttgaaggaaaaattgagactggcggggtatgtgagtgtgtgatataaacacaatgggttttttactctttcccttagtgcagatcattgaaacttctataaagtctctgtaatacccttagagagtacaattaatagtactgaagacgtccttataactgaacttttgtaaaattattgctggatttttgtctttccagcacacattaaacctcaccaaggtatggggctgtccttcagatgtcacagcctgatgaactgagtgctgacctggctttgggagcacttttcagttatcccagctgtgcatggcccattgcatggcctgtgacaattttctggggttgtttctgtccatatttccaacctgacttgcccaccagggcactttctgcccttgtaagtaaatctctatgctgcttactgttagttcctgtttctgaagtgctgattcgatgtgtaaggcttctcctctcttttagatctgtctagagaggagtgttttgcttcagtgagctccaggaacaaataataagtacagcaagtacaaggccgaggacagacccagtgcactcttatcagtcatctgaaatatgcacagcctttccaagacaaatgtgcactcctgtttctaggaaaacaccagaaagtacttaccaattaccctgtatatgctgtgtggaaaaagacaacatcagcctaccctgaaagccataacaaagcagattcctccgggccgccgacagctgagtggcccgagttagagcctctgcagaatcccagcctgtggcctgggccaggtccaggtccaggtccaggtccaggtccaggtccaggtccagggggcattcttcccctcgcatgattaccacgtccctcaccctttgcccaaggaactgacctcatcttagaagaagtctcaagggttggtgtgttcttactaagtgcccaggattttcttccagacccatcacaaatccaaagatggctctcctgaagagaggcctaaaaaagagggtgcggcccagggggatctattatagtaataaccgcaggaacgagagccgccgctggtgggcagctcaccatccgccaggagcaggcttggcgggcactgttttatttggtcttcacagcagtcctctaaggtaggtgtcatcgtcctgtttcagagagaaaacggaaactgagggttaaggaaggtaaccaacttatccatgatcacatggccagaaaatggtagaggcaggattcaaagtcaaatgagggtctttaaccgctatttcatggtgtattcacaggcagtactgtaggttaattctgttcactaaatgtaaagtatgtctcgtattacagagtgcttttgtcttagtgagaaaggaaaatcattttaacctgcacacttaacctcttggctttatgtccatttacccatctaggactcaagcacagagggttcggaaaccgcgttgctgcacggggccccaggggctgcttccccgatattctgagagccaggcggaaggacaggagcagctcttcaaactcacagacaacatacaggacgaattgtaagttagagcatgggaaaccagccctgtgggtctactgagttgcctcttcttttgatcctgagaagtctccatctgatctgagttattttcatgactcttggaccttagatctggtcaaagaattccttgccccaaatgttttttagatttagatataactgatgctaaacagccttttactcaaagcagtggttctcaactgtgtgccatagcctggccttagtgttttgtttctagaaaatgacagtctctttctagttagttcaaagagagaagatcatgaataaaatgttctcaattttaaggtttttctcctgtaaaaatttcttaaagtttgatatcccatttttgccgcagaatgctagcaaaacaaaacagaaaaacaaatagcaaacaactaatagttggacattttggaaatgtatttttcgtaagattgcttcgttactctttaaatatggagccttatataccttgtcatatcttcagttagtgatattattcctagttgacacggtagagttaagtatttcactattttaggatattttgcagagatccttgtagcatgaaagtgctctataacctgaataggtgttagaaccaccagcccacagaaagcagttagttgtgtctgggagtagcaaaatactagattaatttcttctgatgcttatttgccatctcctttaaggtaaagcgagcgtgggggattctgagtgctgtgggtgtttttcggtgggtggaggaatgtctgaaatagacgtcaactgtcaggatagtcttcagagtcattgttagggacagtgttaagtagatctcatctcatagtttcatggtagtatttgaatggggatatcaaaagccaactccagaaggtatttgttgcttgccggatagaatggcatcttcctacatgtgccttgtgtgacccctgtggtgttattagaaggtctcttgaagatggagttgtactttcttgtttcgtctacttgggttgccattataaaatatgataggctgggcagcttaagcaacagaaatttgtcttctcacagttctaaaggctgagaggtccaggatcaaggcatcttctgattctgctgctgctgggggttctcttcctggcttgcagatagccctcttctcactgtgtccccacattgcagagagagagggggagctctctggtgtctcttataagggtactaatcctatcagctcagggccccaaccttatgacttaatttaactgtaattactttcttactccaaatggtcacattggggttagggcttccacatatgaattggcggggagggggtaactctgtccacagcaggtgttgctaataggttctgccgtttcagtccagtgcccagagtgcccatcagttcactccagaactgctccagttcattccttggggcagggatttggtaccatgactgctcttgatattgctttgtagatggaacttttagcctttggatggggggtctagagaccccccatccaaatttctcaggtctggcaggatgtggtgcagagtctactacaatggcagccctgtgaggctgggatttttgcctgttccattcaggaaagaatcctcagcacatagaacagtgcctggcatctaataggtacccagtacatatagccagatagctgcagttcagcatttgtgttcacatgcgtccattttccattcatttgggggttttttagtcacaggctaaatgagattataaattattgcatgttttcttttcactttcctccccaactcacctctattcaagtcgaactatctctggtcactgtgaaatttgtttgcaatagaagaaattgcgtggtacagccaacataggactgctcccagtgagatacacacattgaaaaacagagccagagagagctaaaaactggaatcgaaatgaaatcagtaaaatagctttcatgaaactcatgaaattcatatgaactaggaagagatattggcatgaatgaattttgactttaaagatgaaaaccatgtgtctccacccaagttgtgggttaaatcttgccaatgaatgctgaaggaggcacgtgaccacggccttcccaagtgtacaaggaagaagccatcagggagtgtgtcgcatgttcctctgaagtgtcctcagttgtcagcctgggtcttcgcggtggagtgaacattacactcatcactctgcaagaaaggagttttcaggaaaagcccacgagcgccaaattatacctctgacttttatcctagatttgtaattaaaaacatgtttaaagacctaattatttgcgtatttcccttcagagttaacccctttaaaggatctttaataccttgctctactgttctgactaaatgtttccacatttttttccagttaggctcactgtttcacttctggaaaatattgtgtaattatttcccgatggagtgaaaaccccacgaagtccccagtgccttggtgacttcaactttattctcccagatcgagttgcatttaattttgtcattctatttaattaattaatattaaaaagatagttaccaacgtatgatttctggtctggccagctgaaaagtcttcactttcaaattaatcatatattcctctgataagttgcacaattgtcattgcttcccatctttctcagttttggttttgaaacaggatctggattaagatgatgttaaagtaaaatttgtcctatatggtgaaattaatttttctttctaactcatgtctcatttgtagccagaaactcattttcttttttttaaggtacctattttatttctaatactgcatcacctataacggtgcacaccaggctggtgagcagtagggtggctcctgccttttaaaaaatgctcatgagcaacccacatgacctacgaagctgctctaatgtactgctttctggaattaagacaatttaaattgtacttttaaaatatagttttagaaagtaacatttatgggattttttaaatacagaaaagtataaaaaataaaagtaccctatgcatccaccagccagataagttgttcctcttttcaattttttgtagagatgaggtctcgccatgttgcccaggctggtccgaactcctggcctcaagtcatcctcccacctcagcctcccaaagagctatgaggccaaagtgggaggatcgcttgaggccgggagttcaagaccagcctgagcaacatggcaaaaccccatccatacaaaagttagccgggcatggtggcacacacctctatccccagctacttgggaagctgaggtgggaggatggtttgagcctgggaggtcaaggctgcagtgagctgagatcacgccactgcactccagcctgggtgacagagtgagaccctgtctcaaaaagatactcatatgcatggttagcaaatccaagagtatagaagaaaataaaatcaagagtaaaagtctcttttcttatctactttgtaaacatgctgtttacgatttttgtatcttgtctccttgagaaatttcacagagagagagcaatcaggaaaatttttgagcgcaccatataatattgattctaatagcatatcattataaatacaaaccttatagtaacatatgtagtctcaaggactatatatgtttcattccttctgaggaatggaatagaatttattagcttccatttcctaaaccaggaaataatgtactagtaactgttgacacttacagaattggccatttgttgatacacctctgaattaaaacttggatttggcagatggctcagctactctgataaagttaaaggtttgctaaatctttaaaagctaaatcaggagttctaagagaagttttcaactttcctactggtaacatgtgtccagcatccaaagttgcctgtgcactggcaaatttcttgccttaccctaatgccagtgtcattttctgagacagactaacgcatacatttattgaatcctactatgtgccagggtgagtaagaaatttcctctgtcctcagtgcgttcacagtttagcaggggaagcagacactgtattaccaacaacctataacatatattgctgttaaaatagaagtatgagcaacgtattatggaaccacagatgggaagtgattaatttatactggaaagccagggaaggcttcacagagaaggcgctggatgagtcgcctgaccttgcaggaggcggaggaatgtgccaaggagagaaggcgcctgggcagagcacagtgctgggcagatacacgggacagaagagctcacggcaggtctggggaatttggggtcagctttttgtagcagcagcacgtgtggaaagaaggagcagaggctggaagggtgggttcccaggcctgttgctgaaggctgaccttagtggtcatgccgaggagcttgcctctcctgtaggtgggagtgagattgtgaggaagaggatcccactcaaaattcgtcatgaaaaataaaaccttgacagcagcaggtagagagactgaaggcaggaagccagttaggaggcccgtgggatagtccaggtagaaggtggagaggcctgaacacagtggccgtaacgatgactagaagaggacagattggagaggcatttaggaggcagcatcagtggaaccctcaactgctaaattggaatctgagtgaggaggagggttgagagtggcttcgggctccttgcctgtctggttgatgaggctgggggtgctgaagagcaagggttggagaaggagcatctccccagtggacgagctgaggtcccctgaagagggcctggcactcagagcgacactgggcccagacatggagtcagggccataggtggacctggggtgggtaacgcctaggggtagaggagcctgttccaggagctctgagtcaggcttctgattttgaaatgactccagagggagtagaatcaggtatataaatgagttaatatcgaaaaaaaaaaaaaagagcaggaggaaaattaagtagagtggctgaaacagttacttggcagatttctccctgagagaagctggtcatgagtctgttttccatgtggccttctagagagacatctctctccaatctgctgatgagaggatgtgtggggaaaggaggggtcatcccccacaggtttggggtaactgggcacctgttctcaacagaagagctaccattaactgcggatctcttctgtgtggggcacgtagattagctcacaccatcacagtggccctgcagagtagacccatggggttctacacatcaggatggggaagctctgggcaaagtgagaggcggagacgactggcatcagggtggctggctcccctggcgaggctgcagtgtggcttgggaggacgttgtgacctgccccagaggaggcctgaggctgctgttgatgctaccatggctgctgttgttgagaatgccccgtggttcatggtttatggatgacattagtgatggtgcattctactaaggcggcactggctcctggcagattcacccactcttagcacctgtcatcttggaaaagggtgtaagctggtgctgcagccttcccttctctcagaagaaactttctgacactgagccccaagcccagagtatcctctttctctccttaaaggggagttaaaacttttttctttcttcttcttctttttttttttaatagagatggggtctcactatgtggcccaggatggtctcaaactcctgggctccagcgatcctcccacctcagcttcccaaagtgctgggattataggtgggagccaccatgctctgccctaagagttgaaacttttaaccgaggtttaagaatagtataaaaatcctattttttaaatagaatcaattatagtatctacagcaacctaaaatgtgtcaactgaatactgaggtgacttctctaggtctcagattggaaggataaagcttatctgatgctgtgtgtttctggctgcatttttttgctcccctttcctctcagttaatagcagatcagagaacagaaggagtttgctcagggccacctgagaccacggtggccttcttcccttgaggtttttccaacagtcactcattcgtggaccaaaagcaggccttgcgggaagcttgattctaagggcagtgaagacaggagagcctggggttgagactacaaagcagtgtgagcactcaaggaacctcaagtgaggcaaaggaaagcctgggagaactaggccagggaaggggaattacctgtggctttagggaaagggaacggaagaaggtgcagcttggcagaggggagggcggggagcgtgccgcgtttgccaggcttctcttaccaccctgagttttgctgcttctctcacagagtgacaagtttgatatgaggctccattagataaggggtctggtctggagctgtttaattattctttgatgtgtttggcagattttgtaaaaaaaagaaaaagaaaaaattaaaattaataataataacgatgatgatgcaacccaaagccctggccattgtgggatgcaggaaagcctcaggaggatgatggggacagagctgtggccacctggtccctggggtcactgcccagttccagctgtggcctcactctctcccttctccttcttcagccagacccttggctctgatctgcttttgatttgaaaggactttagaacatttcatgcacaatttccagaaatatgttattatcagtagcagcttcggggcatgcacagggtcctggacttacaggacagagatccgtgtggagtgacagcactgccttcctccacttacctttctgtatgaccatgaattccttgacctccgtgctcactttgtgaagaaaactggcagggattaccctctccatcagagagatgaaagagtctgagctaccaagaaagcaacggactcggccagagtcagccagcgggccgggctttcctgccagctcggcctgtgtttccttcgctgtgctctctacttttccggagggcgtcccagctcagagtcacccctcctccagaagtggttctggcctgatggaggacttgaaccatctggggcatcttggaaaagagtctgtttgaaagcctatagaagtgttccaggatggaaagcacactagtcatgtcggccactctggcctgggtgtgagagcatctgcccggatgggaagcccttggctgacatgtaaatgtcagctatgtcaagtgcccagggtggtggcgctgggggctgggggctgggggctgggcaatgaggtggaagtgcctgtgctgtgctcacctagaggaaggaacctcacatctcagttggatttttcatgcacattcctgctgtcatcccaatcatggtggccaactttggagtctccttggagagcctgtgacggcctcagtggctgtgcaccaggcccaccgatgctcaggggtgtaggctgcttccgggtctcatctcagatccccgccagttctggctggcgctgtgtcacctcttctctgtgtcaggatcatttttatccctctctgtctgtctttctgtctttccctgtgccctcctttcttccccggaccagctatttcagattccattcaactctgttcagtgatgctgccgctctcaatgcggttagagcgcaagatgtgagaacgtctgtgctgagtggcctaaacactgaaggctgcgggtctttctaatttcagcattgagactttacaagtccacattcttggcattgccaaccagttagaatagaacaataaatcccagtttttgtcatgggcgtctgtaattaaaatggcaactggaacaaggcagtcacttactgagcgctgatggggtggccaactctgtggggtgctcaggaagacacggggctgtgagatatggactccacttagagggctcacctcgtagtcagcaaagagacttatccaggacatgtggaaagaatgagtttgtgcttggccatgctttgggggccatcacaattaaatgctcaaaagtggaggaggggctggagtatgtgggggatgcttcacagagaagttagaacctgtgatccttgcggggagggggatgggatctagagaagttgggagagcaggtgtgcgtcctgcacggaccccaagtgagcgagggcccggcagcctgctcccctcgacaggcaggccacctcctgcccccaggcttctgcccccttcagaggacctgggaacaacgccgttctggacccaggtttcagaacacttccaggtggagcctggctctgagcaattcagtttgccagcaggagctcgactgccactccgtcgtcagcctttagtattcctgccactgtccatccttgtctgctgtccctggacactgcagccccattgtgaagggctgtcacaagatgcaggggaggcagccaggcccgggagaactgtcacactgttcccaaggttcactgctcttcattcagtggccagagaggtttgatgtgcataaatttccactttgaatgtgtgagctccatgatagaggaattcagttttgttggagtggccctaaagctcctgaagtaacaactagaagtttccaaaaggaagatgacagttttacctaagaaagcgttttctgactctttgagttttctgaacatgaagtggatgggggggtgccctgtccctggaggtgctgagcttagagagggaggaagcggatggggaggtgcaggtgttttaacgccaggctgtctcttcatggcgtgccatttggtgaacctgtttaattctgcttttcccccctcagctttcagcgcccccagctgcgtcttctcgccccttcatgtttccctctcctctgccaggcagtgaactttctcagctgctccttcagtttcacattgaaaggcatcgtgttttctgttttgtccaatagagtattgttacagttttctgtaagctttaagctatccaaaaatgctcacagaaaaacaacaaacacccacaagatagaatttcaggatttagaagtatttcccggcaagggggccgggattcgcactcaggccctggggccacagagcccgcagtgggcctccccctgatgctgggcgaagccccaggtgtcactcctgtgttcccgtctcgctttgcagcttcatcgctgtggagaacattgacagctactgcgtgctcatctcctccaaagctgtttacttcctgaaaagtggagactacgtggatcgagaagccattttcctagaagtcaaatacgatgacctctaccactgccttgtctccaaagaccatgggaaggtgtatgtgcaggtgaccaagaaagccgtgagcacgagcagtggagtgtccatccccggcccctcccaccagaagcccatggtgagtgcctggctgttctcaggctcctgaggggcggggccagggcctcgatgcctctgccctgcttccccgtcctcagcaggaactcatttaggaggttgaggctgggcccttcccaggagtgctgcctctcagtcctgaacatgggaggggcccagggtatgttcacggggcgatgctgccctcccagctggcccatgggtgaccctgggaacattaactgcctcacaacgtttgtgcctcagttacccgtagatgtagtgagggtaacaatacttactctcgttggtgataaggaacagctaacacaacacacagggtttttctgctcccaaaatgggattcttcagtgcaccaaatcgaagaaagcactggagctcacgctggtttctccattgtttctccttaacagtggaaaccgtaacttttgttctagtagcatctagcatgctcaataattatttgtaaataaaagttatactttccctccaaaggggacaaggtattgttatgacaaggcttttaaataataaagctcctgcgaatagctaacgttcctagagggctggctgtcttgtgggttgtctgatcactgtgttgctgtcatcccctcctcactattggtcatagcaggtgattcattcaaggctacacagctgaccttgaggagccggggttcaaatccgagtggcttggcaccagagctggctgcagagcctcttgcggatctgtctctggccagtcggccctggaggcttgccatgacacccaggtgttagtcctgctcattctcacccggcatacccggattttgaagcttgcattcaagaatgatacattaatcaaaagggcctgcccacctctgctctctctatggatcggaaatagcgccagccttattgggcctctctcctccggagtcctttggcctccccctgctcatgaatgcatttgggcctgtttggacttgtgtaaggctcccgtggggtcattggcttaagttagagctggctgatgaagagggcgagcacctcaaagtgtgagtatttctccagatcccttcactgtagcaggtgggcagcctcgcccactatacttctgcccctttcaaagcaggtgggcagagaggtgtttgtggtaagaaagacctagaggcttttgttcgctgattcttcttccttcatcagccatcaccagaccttagatgtgaatcccccattcttgctcttggtcttacctctgcagatcagttatggccgtgggggggagttcccaaatgtcaggtgagtatgggttggctgtacagtcctggggaatgtttaaaaagaccggctgggcgcagtggctcatgcctgtaatcccagcactttgggaggccgaggcgggcggatcacgaggtcaggagttcgagaccatcctggctaacacggtgaaaccccatctctacttaaaaaaaaaaaaaaaaaaaaaaatcgttagctgtgcacatgcctgtagtcccagctactcgggaggctgaggcaggagaatcgcttgaacccgggaggcggaggttgcagtgaaccaagattgcgcctaggcgacagagactccgtctcaaaaaaaaaaaaaaaattgcagggacccaccccagacttgtgagtgcgagtgaagcaggagcagccctggccatcactgtttctttgacgtgtacatcccatcctgagatgcagctgggctgggagccgccacctgggtggatctgattcctggatttccccatcctggggacaggtgacccatcctgttctcctccttaggtccatgtgaaatctgaggtccttgctgtcaagttgtcacaagaaataaactacgcaaagagcctctactatgaacagcagcttatgttaagactcagcgaaaaccgagagcagctggagctggactcctgaagccccgctgctgagatgggcgctcccgacacagcgcagacccaccaggaggaaagaggcccagctctcagctgacgatggaggcagaaccggagtcgggtttggggaagttgtcaaggaatgagggaaagtaaatcctcatgaggaaaagtacaaatggaaatcgtattaatttgtgaggcagggagttattttagattatgggaaataatttttaaaggtattggttaaataacgtttaaaaacatgtactgagatgaatctaatttttagattgccctgtattttgttaacatgtatatatgtacaacagtgtgtttgtaaatatataggaacgtttctgaacagggtctgtgctatgtgtaaaggtttgttaactgtaaagtaatataaagttatattggatcttctattgcactaattctagatgtctaattcaggatactgtctatagaaaggcattcttaaaagttaaagaatgttacgtcttagttttggagactaaagtattcccagtaaagtgggttgaggtgagggctgtggtcctgaaagggacgcctttgacatcgtggctgtccagttgggctgtgagctgtggcacccaggactggcgctggcccttcagaaggatctaggagaggggcttgggagcccacttttaatttctcacccccattttacaaagagtgcttagattcttacaaattatgatgtaagttatccatttggctttttcctaactagtcttaccaaacttagggggaaacctgtgctccattaccacatgggtgcaagtcagcattgtaagttttctcaggttattattattagagaggttggaaacattggtaaactctgttgattgagaaggaaaaaaaaagtcccattgaactgttgcaacaaatcagaaatccacataaaagtgctctcctgcctgggcagcaacaaccaagaacaaagccccgggactgttttctttttaataaagccacaggcaggcatcgtagctccacagcccgaggggacacaggatggaaaccccaggatgagaagggagcagggagagttccagaaagggggatgaaataggagtattaaaaagctgcgttggtaagtttttcatggaaccaagatttgacaaaggcatctcttatccttggttttaaattcctgctgggagcaaggcctggtatgagcgccctgggtcttgtttttggtgtttcgcttttctgtaaggattaagcagatagggagaagggaaaaggggcctcactttagaatgaatgagtcaccttgtgatttttaaatttttattttaataaagctaatcaatttctacaaccttgtcacatgtagctgagtctgggatgactcagtggatcagtggatgcgtggaaggttttggtgtttataactcatgacccaaatccttccaagacacaaatgaagctaatcttcttcccctccctttcctctcccacttcccctctgtgtctgtgtctgtgtgtgtgtgtgtgtgtgtgtgtgtgcgcgcgcgcgcgtgcatgcagagaggaaggaagggagctttagcacaagtagctacatagtgttcaaggatcagctttcttgaactccgaggcttggttgcctttgctgaactccaagttagtggattgcagaatggaaacttggcttttgcggcactgggtgagttttagtttgtgtgtgtcttgctggggggtggtgatgattgtctcagcactcacgcactgcacaagatggcagcaggatacagcactgcacaagatggcagctcctctgcagcttcctcctcagcctccctccttgcacccccacaggtttggcttgtggtttttgtcatcagtaacctactgcctgagatcatgatctcttaaaagatgagactctcggaagggttgattgtatgcgtcagtgagccttctatcaccttctggaacaaagtcacttgaaatctcttgatgagattaaggagtttagtgttactaagaaaatctgctttgggccgcagcagtgctgggtgttctcagacctgactgaggaagttagctgcgggctgccctgtgggctggtgcttcaggaggaatccagagaagtgttcagatgccccccttgggctcctttctaattttaatcagctctttaaatagctgcccatctcctgtgattgcacaaccaagcactttgacatttgcaccttaggagaggcagatgttaaaatggaatccaaagaccacctagggcggggctgggtgggagatgggagggccaactgcgagctgctccacttctcagctctcccctgccctgcagccctgggccagacaaggccagaaggtttcaggggcatttgacatcccctcctggttctcaccaggaaaacatccaaagctttggaggaaacaggccctgcccctggctccttaaatgccccgtctctttgtaaactgatattcagccagcaatgcctaagactttgttaagatcatttctactgcttttctttctgcttcaaacacacagttcgtctctgaggaaagtaaaataaatggaataagagtaaattgggtaaggagatatccaaagctacccagtcccttgacccagcacagttggccgacccgtgtcactccctggctgtcgctgcttctctgtgctcactgaagggtgagccaggccagtgcttccccagcccctgggcctggtcactacacagtggaaaacagacaagcggccccttccccaaatcccaagagtgtcttgctgcttggtgggtgctcatcgcaatgttctgaaggctccagggccactttgtttgtaagtatgatctgggcctcaaaataccatagtagctgcttgataaaattctaaaaatatctggttctctattatgtaaacactattacagtcaccagtgtgtgaagactcttgagtctggttctcatatcagagtcatcatttttcttcctgtggaataaaatgccttgtggacttcccaaacttgttcttttgttttcttctggtctcttggtgatccacagcttctagagctatcaccagtgacaaataccaaacatagtgtgatgttcacaataaaatgtggcctctgcccccaggcctggggaagcacccccacaccttaaccagtctcagcctcccaagagtaagtagtagtctccgcgctacactggctgctgatcagtccattctgaggttcctggtccaagccccagcaggacagacgtcacacttagggtttaggcagctgaagaagaaacagcaaaggaggccgggcatggtgactcatgcctgtaatcccagcactttgggaggctgaggcaggcggatcacaaggtcaggagattgagaccatcctggctaacatgatgaaacctcatctctaaccccgactatatcgcccctctctattccatccactccacctcaaaattaataaccttgtgtgtcgcccaaattttcaccacgttatataattatgtgtataactaaaactacaaaaaattagctgggcatggtggtgggcgcctgtagtcccagctacttgggaggctgaggcaggagaatcacttgaacccgggaggcggaggttgcagtgagccgagatcacaccgctgcactccagcctggcacaacagcctggcaactctgtctcaacaacaacaacaacaacaacaaaacagcaaaggaggctcagcaggatcatccagagatggagtgacaccaggagggtatggatcctagaagctgaggccagaaaggtttcaaagactaccgagggctgctactaagtcaggtgggattcggaccaacaattatcagtggacctagcaatgctgaagtcactagagacctttctaagagctgtttcaatggagcattggaggtgaaagccgggttggagtagattcaagaggaaaatggaaggagagaaataacaacagctctctacaggaatctggccataaatggagagaactgaccggaaattcaagagggcagggaaggaataagggagaagagggcctggcgggccaggaagatgggtggaggtgggggagcttgagattccattgattgctcctgatttctcacatcaggcaagaatgaatacagggcgggaagtgatgctgatttggagagagagaaggtgcacgtagtcatgtagggtaacgggaaagggaataggccacagaagcatggtatgtttgccgggcgacattaaggacccatttgacgttgatgaccgtgaatgtacagtggaatcgggcagcctggctgtattcttgtccggccacatgtagctgcacagcttcagtgttgtagaacaggcaaagaactggctttaatcaagaaatgttcccctcacctattcaagtacctcatccaccattgcccagttgaactggccaagagccaatcagaacaaaatgtcaacagaaatccaaaagcctagagaagggaggggctacgctttccaaaccaaagcacagcttctgaagactatgccccttccaagtgggagagacagtggaaggtgtggttaacaacccccacacgcgcacacaattagactcttttcaggggttcacagatgcagtgggacagtcagtgtttgacagtgaaccagccaggcactccagggcatggggatgtcattgacatagaaagggtatgtgtatgacgatcttccatttcctcagccgaattcagcaagccgtcttgcaggtattggttggctgcaaacacagctttcaccccagctctttagaccaagaatgtgatttctagcaccgtaagagatacttgatgtttgctgttcactggacactgcatcccaagaccctaataacagaaagtgcttcctgaaaacacacccaagcatgttcattattatttagaagtttggattaacctggaagagcacttcttcaggaaattggaagtgagattgcactcgcatctgcaagggtcttgaagatcatccaagttgtggctctctggctgagggcatgataaaagcaatcataaagaccaaagaaagggactgtaaacctagcgctttaggaagccaagccaggaggatcaagaccagcctgggcaacagagggagac

SEQ ID NO: 1666 - DNA, 4802 bp, Homo sapiens
agtttgctggaacattatcagatggcttacggaagacgatggacaatcggcatcagtcagagcgggagtacatcaggtaccatgcagccacaagtggtgaacaccttgtagccggcatccatggcctggctcatggtaagtcatgggtgacatcaggctctgctgctgctggtcctcagaggcgcctttgtatcaatctgattgcagctataaaaaaagaaaggtgggctgggcgcggtggctcatgcttgtaatcccagcattttgggaggcctaggagagtggatcatgaggtcaggagtttgagaccagcctggccaacacagtgaaaccccgcctctactaagaatacaaaaattaggccaggcacagtggctcaatcctgtaatcccagcattttgggaggtcgaggcgggtggatcatttgaggtcaggagtttgagaccagtctggccaacatggtggaaccccatctctatcaaaaatacgaaaattagacaggcgtggtggtacatgcctgtagtcccagctactcgggaggctgaggcaggagaattgctcgaaccctggaggcagaggttgcaatgagctgagatcgtgccactgcactccagcctggcaacagagcaagactccaattcaaaaaaaaaaaaaaaaaaaaaaagaaaaggctgacaacagaggaaatcctgtgttggcgtacctgatagccttccaagctctcttactttatcctccttgcagttgaaatacgacagccggtgagaactcctcattcgctttctgaatgttgtgcacattgcaattccttttcgttctctggcttctgttcccaaagtatcataaggtgtaatcaaccagacctgttcttagaattgtagctgctacttctcttagaattgtaacctctgccttctccttactgatcattccttccaaagaaatggaaatgaggaatttgtggccaggtttgtagcccaggtgttttttagttttacataaatgtgcattcactaaaattataaatttatttgcctaagagatgttggtgatggcatgaatgcatttggtctctgactttgaattcttttaatgctttaattctgagtcatttgccttttgttgcatttttcttaacaatttcttagtacggcatccaaggcccttggaactataaatccagccaattttccaaccaccatccttcagccatgctgcactttggccacacacagctatgtactgcttcccaggtgtgcttccaagtccttgctcacacatggtccttctgctctccctcctctgcctcatttccttgtctatcaaaatcctactcagcctgtaagtcccaactcaatacattttcccagctctattgtccctgttagagttaatgacagagcacagtctgggttgtgtatgtcaccagctgtgtacatctgatagattgagaatgtgaggaggggagaaggaccactttgcattcacctttctccttgtgtacctcacatgacacctggcacatagctcatgcatagtaaggcttagtaaattaaactctttgtaccagatccttaggaaccatccaaagctatcagagtcatatcaaacctgatcagttttaattatctgcatttgaaaaagatgaaggaatatagacagtgcaatattatatttctatttgtgcttagggcacgtttagatagaagtttttgttgatcagctttcctaatggtgagatttggatcaaaatgcgtttgcttttcgtaaggctgcccatccgtaaagggagctgtccctaaggagacgtcaggccagaagtgaaatttggctgaaagtgatttgtttatggattttaaaagttgactgttgggcaatcatttggggttaaggtttaatcattctttctcgtaatggtaatgacagtacattggtctcttagaagacttttaaaatgaatataaaatgctttgttatgtgtggtggcctttatctggccagcatccttgtgacgtggagagagcatggctctcctcactttctggatgaacacacaaatgtgctgagaaaatgcatgattggttcaaagttgcaaaatcacctcccatcaagaatcattcctataatatgtacagcctctccaggagccaatggcttcatccaaagaggatccactgagctctgggttatacgaaggcagtatcctagagtgagagtcttcccttaggatgaaaagacctttagaaggtgataagaaccagaatccactcaatccccttgatgtaagaaatgggaattgtgctcagttctctctgcaggccttgctggacccaggttcagtcatgttctgtctctcaggtcccagtctgaattcctgttctgtgtgtgctctgccaaaaactttgttcaaaagtttgggaaagggctgggtgcagtggctcaggacagtaagcccagcactttggaagacctagagggagaatcgcttgagcccaggagtttaaggctgcagcaagcggtaatcatgccactgcactcctgcctgggtgatagacggacaccctgtttctaaaaaaaaaaaaagtttgggaaagagatattgcctcactggagcaaatttacccagaatccaaaagaaatgttgtgaattgttagtacattctcacccaaggagtttcctttaccaatttgtctcactagagctgaagagtctagagagcttcctcacaccccactgtcagagggtaaacatcctgtgagtgtccctggcacaggtcctggagatgctccctagacgggctgcctcttcccttcagtgactgtgacctcttcagcctctgccagcttctggcctcttctaaggtgttttcagccattgctgtcaacttgcaaaatgtttggaatgcctttttgacctggattggtcttttgaactgactccattgagggtcccagccagctttcacagctttttggggtgctcttcatgaaggttttatataatcgccgataccgaatttcatcaaagcatgcagtagcttttaccttatttcaagcatccagtggggttggccagtcacccccatagtgttctttgaaaattgcaaatgtataccatcagctctccatatccacagattcagccaaccatggatggaaaatatttggggggaaaaaagatttcacgaagtgccagaaagcaaaatttgaatttgccacacgtttcaaatactgtattgactccacacaaatgaagtgatatgtgggcatcgtattagctacaataaataatctagaggtgatttaacgtatacaggacggtgtgtgtaggttatatgcaaacacctacagcacattatgtaagggacttgagcatcctaggattttggtatctgcaggggatcctggatcaatcccacatggatactaaggaacaactacatttagttatctctctctgccttagatatctttcttttcttttctttttttttttttttttgagacagtctcgctcggtcgccagactggagtgcaatgctgcgatctcggctcactgcaacctctgtctcctgggttcaagcaattctcctgccttagcctcccgagtagctgggactacaggcacgcatcaccacgcccagctaatttttgtatttttagtaaagatggggtttcaccatgttggccaggatggtctcgatctcttgacctcgtgatctgcccgccgcagcctcccaaagtgctgggattatgggcgtgagccactgcgcccagcctctgccttatatttcataggatgccatcatcttcaaactttccccgaaggcccaattttctagtctcctgttgatttaatcctctatctgtatcctctcctgatcgtccgtaggctgcccaagctctgggatcgaaaaattggccactgttaacctctcagcttttctctgatttttttttttttttttttttgaactggagcacactttacttctgactaacatgtaacatatatcctctgactctggacttaatgggcaaatctgcaggatcctcttctgtgagttggcctgtctgtggcctctctggcacagagattaatagaatggccttaagttatcattccataatcaaggggtttggctttaaatgcttttgcttttgtcctcgtcaggttacaacagcccttgtctttttcactaggtatcattggtggactgaccagtgttataacttcgacagtggaaggtgtgaaaacagaagggggtgtcagcggtttcatatctggccttggaaaagggcttgttggcactgtaaccaagccagtggcaggcgccctggattttgcatcagaaacagcccaggcggtgagagacacagccacactcagcggccccaggtcagtggtgtgggaagaatggcttttgcagtttccagcctaggtctgctgcttctcctaatccatactgatgtgtttaattgtgcactttcttagttatagggtttttaattcaaatacttgtaactgaaatttctgatctgcctaatataaaaagatgaaaatgaggtacagaaacctggcatgaattttttcagataaatatatatatagcatattttatatatgctatatattttatatatgtatgtatatatagcatattatatataagtatgtataactatattatgttatttttctccattagagaggtcagaattaggattaaactgttagaagcttcttctgttcaccaagccaactggatccccacatgcctatgaagaaaactgtcagattg

SEQ ID NO: 1667 - DNA, 274 bp, Homo sapiens
ttttttttgagatggagtctcgctctgtcacccaggctggagtgcagtggcgcgatgtcggctcactgcaagctcagcctcccgggttcaggccgttctcctgcctcagcctcctgagtagctgggactacaggtacctgcaaccacgcccggccaattttttgtatttttagtagagacggggtttcactacgttagccaggatggtctcaatctcctgacctcgtgatccgcccgcctcagcctcccaaagtgctgggattacaggcgtgag

SEQ ID NO: 1668 - DNA, 425 bp, Homo sapiens
tccccactgttgttgttcaccatgtgggtctgttccttcttaattttccttccgcttgaaagtatcagccccaaccccataaagaaaagtgccaccccccatccccccagcaggtcagcagttctgctgtgggattgctgtctggccttgataccagctgagactggaaatcagggacagcccatatggttccaaaccccacagaacccaactgctttaacgtagctgtttgcttgaatggcctattttagcctcccttttccagagtgactaattggggattcttatcaacaaagggtataatgaatgttaagggcccagccaagctagactcgacttaagcccagaaggattttgctgctgcttggataatagattttccctgagtgaattagtacgcccttttagaatgcctagggcctggc

SEQ ID NO: 1669 - DNA, 16037 bp, Homo sapiens
cgcggcgagcgcagcagcagggccgggtcctgcgcctcgggggtcggcgtccaggctcggagcgcggcacggagacggcggcagcgctggactaggtggcaggtgagggcgtccccgcgcacggctggggtaggggacgggagtggcgagcttcaggtccaccggctgccaccgagtgatgggaccggaggacaggagaggtcgctcagccaagagccccggggaggcggtgccttctcggtggggtcagcaacggtctctggggggtgcctgggagcggcagccggtctccgccttggcggcccacagccaccgcggacgcctccctcccggatgtctcctcgctgcccttccctggccgaagccctcccctgcagcctcctccccacctgccggccctgtgttctcactgctcttctctgctctgggatccgcaggatgacgtctgtcctgcttcttcactgtcctttacagtcaccagtctcggccgggcgcagtggctcacgcctgtaatcccagcactttgggaggccaaggcggtcggatccttggagatcaggagttcgagaccagtctggcaaacgtggtgaaaaccggtctctactaaaaatacagaaattagccgggcatggtggcccacgcctgtaataatgtcagctatgtgctgaggcaggaaaatcacttcaactcgggaggcagaggttgcagtgagctgggattgcgccactgcactccagcctggcagacagagtgagacttcgtctcaaaacaaaaaaaagaaaaacacaaaaaaaccaccaccaacaacaacaaaaaaataaagccaccagtctcggagtttcaaatctgagcactcttatccatcttaattctttcaataattcagctaaacgaatggggtcctgagaatctgcagagccaggctcagcgctcgcctgcagagcctgcggtctgtggggaccaccagcaagatgaggaatcaccttcgggaggaagggtcgtgctggggagggtcgcgccggcggggtcaagagaacctcctccagggtgggaatcagagcctccgggccgcggtgtttgagggtgagtggaattaatgccgtgatggacatggggccttctaagggggaccaacagtgtttgtgaagagttgactttgggaggggttcaggatggccagaggtggaggctgtgacctcagtgagtctggatcaagggagggggcaggtgggtaagacaccgttttaacaaggtggctttgagcggccacctttgaggggcctaagggcccctgggagatttaggaggaaggacaagaggattaagacaccgctttctgaggtgccgtgtggctgtggcgtgggggtggctgggggagtgggttgtgttcattgtccaaggctctccagcgctttgcgtggcgttttggggagcacagatgaggtgtcccgacagtggggagtggctctagggagaccagaggctcgggagggggcctgggcattagaccaggcacagaatccgaagtgggaagaaatgtgggcgtagagggcaggccttggggatgggtgtgggggaggagggggagatggaaaggagtcagggaggtctcccaggctcacctggaggagtcagggtctcatttccaagtgcactgggaactgcagcctgggggtgggggttcatttggtttcaggcctgtggccaagagacccaccccctcacattcacactttggtctccagtggcttcacaggcaccacctccttgttctcgcctgttttactcctcaccttgggctgtttcttgcctttccattctggcgttctgcagggatcagatccttcctctcacgcacaatctacactcatggcttttgctgggagtaatgagtaaagctcccaaatagatgtttctgagttaggaagcacattaaaaacaaaacaaaacgaagcaaaaccacacaattgtccaagtcccactctgtgttcaagggtcacatgatgtgcagaagctggtgatgggcaggagctctgaatggagttactgggatgtcaggccgcgtgggcctggggcaggctggctgactgggagcagcctggctccaccccggctgtccaggacgcactcacttgcctctatggatgacagctccttgcctcacagctgtctgtctctgggtcagattcagcatctcagtgtcttttgtgtatcagctgaatgtcagggaggccacaggctggtgcccagttgaaaatctcacaaggactctttgtaaatgcatgcaagaataagaacagcattttcctcctcctccctgaccccattctcctcctcagatgggacgatctggtccttacggaaagaattggagttcactgcttccagctctgtgtgtgtgtgtgtgtgtgtgtgtgagagagcgagctctgcaggcgagccagttctgttgctattgctggtttgagctgctgccatcaccacacttagctaattaccttaacatttgcacttaatttttggccggagactaacagaaaataaatttttctccaatttaaaatacttacgaactttaagaagaaaacaaaaagtacgattccaaaattgccctgtagtaagtaggtcagtaacattcagggagtgtggaaactgcatttctctttattcttcccttccaggccctgcatcatggaaactctttctaatgcaagtggtacttttgccatacgccttttaaagatactgtgtcaagataacccttcgcacaacgtgttctgttctcctgtgagcatctcctctgccctggccatggttctcctaggggcaaagggaaacaccgcaacccagatggcccaggtaagcttgcccgtccgccaggagcagggactggcctgggctgcgtgttctgtcaccagcttcacactcacactccagagccactgagaaaggagggcaggactggggcccgagtgtgcactggccgtttcagggaggcggggtccactggggaagaagtggggcagggcagggaggcaggaactctgctccaccgagatttatttgggggaaactttcctcggttaatcccttggaaaagaccatccaagctgtcttgtcctagcgcagaatctttctttagaaaatgacactgaaattatttgaaacataagttgcaaagaactacctcttttttggagcaagagactttgtaactaaactttcattggtaaggaaggttaatacctgtttcaagttgtttctgtaccaacagctcagggagggcatcaacagaaatttgcaagaaggattccagggcaagtgcttcattacagctgcacactgtgcaggtactgctcagctcagtctcaccaacattcagagaacctgtggaaatgattcaagatcagtgcttgtccccagacctttgtggaaaggagaggagacatacacgtgagatgaaaccgaaaagcgccatccctgagtgcaggccgctggacacgccttcatcatgggagttgtcctttgttcaatatgactgtctttttctttgatgacgcttttcaatagtgaattactcattttaataatttcccagctcattgtgtgaagaagggagggtttatgtgtaaaggctaccagccttaataataagcacagagaggctctctaaaagatatatatatttggaaatagggcattgcaatgaaaatacgcatgccatggcaagctatgtgcacattcagggaggtgaaataacactaagatttttaaaggaaaaagtaaagaggattacataattcctttgaaataattatttttggcaaaaagatcaataacgaaggtgatgtcagtgtgaggttggatggggagttcctgggtagatgtccttgcacaagtattttgttgtgtaaggctgtgatggcctttgtgcaagagcgtaggtttttagagtcctttgtgatagttgtgttatcaggcattcaagcgtgagaaccctctcttcatggccttccctgtctgtttgtcaaaggtttttggttttgtttttttaatattagtgactccattttgattctgaagttccttatgctgaaatctgtatgatctttttctatgttttaggctcactgataaacccttatagaaagcttttttgagagcaccaaaattgtctgggtaccttcttaggtgtgagactgagctctctccatggctccagtgttcaactggatgcttgtgagacaccaaacatactgagtacacgttgctacctgtaacatgcagggaagcgttaatggcagcagaaatattttaaagaattatttatttttccttcattatataactggtaaaagtccactataaaaatttttaaaaaataaaagtagaagggaggaaaaaatccctatgaatccatcaaacagagacaaccacccttgataatgtaaagcatcttcctccagtcctatttctttttttttttttcgagacagagtcttgctctgtcgcccaggctggagtgcagtggtgcgatctcagcttactgcaagctccaccccccgagttcacaccattcttccacctcagcctcccgagtagctgggactacaggtgcccgcccccacgcccagctaatttttatttttagtagagacagggtttcactgtgttagtcaggatggtctcgatcacctgacctcgtgatccacccgccttggcctcccaaagtgctgggattacaggcgtgagccactgcgcccggccctatttcctgattttcacttgacattttgtactttggtgattatatggtatctttacttttataaatgatttttcagctaatgtgaggattcggtgagacagtccatgtaaagcaagtgctcaacatgtgttggctatgaatagtaatagtggtgtcacagcctcaggtgaaattggtcttagcttttggttctgttctatttgacagggtttctcatcaacagtctatgagctgtctaaagtaaatttagtagcttcctcttttttctatgttatagaacagtgtgtattgcatgagaaatagaaattgcttgaatattagaaaaaaaaatccctcaaaagatcatctaagcctttttagaagtaattctctctctccctcttattttttttttgttcattcattgtgactgatagattctgttttttgtttgttttgtttgttttgttttgttttttgagatagagtctctgctctgtcacccaggctggagtgcagtggtgctatctcagctcactacgacctccaactcccgagttcaagttcacgtgattctcctgcctcagcctcccgagtagctgggattacaggcacatgtcaccatgcctggctagtattcatatttttgactggcatttggtaacttataatctgtactttactgaaaataattatatagagtttttgttttaacattccctttgtttatattgctgtaacctctttttcacatataactttactttggggtgctttttcttacatgtggtgggtggctgtctgttttgtatgtatgtgtgttttcttttaaagaaccagctcttggattcattgatcattttgtgtttgtcccaaaattccttgggagtttttctgtatcttttctaacataatgattttaaagttttagcattttattactttcttggtaatattgaaaacaatgctatgttttaacttatctttggccaaactctttggtctaatatatatcacccatattttgattattttctaaatcatatgtcatatacttatttagaagaatttgtttgtttgtttgttttttgagaaggagtcttgctctgttgcccaggctggagtgcagtggtatgaccttggctcactgcaacttccgcctcctgggttcaagtgattctcctgcctcagcctcccaagtagctgggattaccagcaagcatcaccacacccggctaattttcgtatttttagtagagacaggatttcgccatcttggccaggctggtcttgaactcctgacctcaagtgatctgcccgcctcggccccccaaagtgctgggattacaggcatgagccactgtgcccagcctagaagaatattttaaatatttgtttagaagaggattttttgtgttttttttttttttttgacatggtcttgctctgtctcctaggctggagtgcagcagcttgatcatagctcactgcagcctcaaagtcctgggctccagcaatcctcccatctcagccttccaagtagctgggaccacaggcacacaccatcatgcccagctaagtggagatgggatcttgcaatgttgcccaggctagcctcaaactcttgggctcaaacaatcctcctgccttggcctccaaaagtgctgggattataggcatgagccactgtgcctggcctagaaaagtattttaatttttactttgaagagttaattatttagaaaagtgttttcagtaatattttgtaggtgattttcattttgttggcattttatttataatgctgattttttgttactacattgaagttagagaatatgatctatataattctgtatttcagaatgtattgggatgttgagacttttcttatggcccaatatgtgtgatatattttgaaatatttaatatacacacatgtagtccctatagggtacaattttaataactgtgttattgtcttattaatcacattgctcatgtaatatccttgtttccttttgaggattctgatgattgtatttccgtctatttttccatgcattttttctgcttttaactttttaactgcatctttttttttcactataaattttagaggtaattttcccaccacttagggtacatttatattttccttttgatgcaagattttatcacaacctcttttctgagcttttctcacccttgtcattttttgtgtgttactgatctttaaacaagcgagatccattcaggcagaatggctacatcttttactcgcctgttttctgtcccctctctctcctctccccagccatcaaagagctatcttgataacttttaaaattatctttcacaacaggcactgtctttaaacacagaggaagacattcatcgggctttccagtcgcttctcactgaagtgaacaaggctggcacacagtacctgctgagaacggccaacaggctctttggagagaaaacttgtcagttcctctcagtaagttgaatcaatagaacaataaaagttgcattcaacatacctggtgatatagagtctgggagaaagaccctagagaaattgagaaatttatgttaaccaatttaaaaaaattgcactatttttttttctaagatggggtctcactacgttgcccaggctggtcttaaactcctggtctcaagtgatcctcctgcctgttgggattacagatgtgagccaccacgcccagcctaaacttctttttttttttaaagactgcaattctataattataccttgcattagtattgcaaaagtagtctctacttttcttgaaaggtaaaattgaaaggtaaaattctcaagttcatttctggttattcagggttcaatacatacctattcacaaactctgatattttaacatatcttcatatgatcacttttaaagagttatgtatattctttttattaaaaaaagataacatatttagaatttttggaagtttgctgacatttgtatttagcaatgcagcctcactgaacatttttctctccaaagacgtttaaggaatcctgtcttcaattctaccatgctgagctgaaggagctttcctttatcagagctgcagaagagtccaggaaacacatcaacacctgggtctcaaaaaagaccgaaggtcagaatgacaagttattgcaccttcctcccaacccgtcctcctcctgcggctcttcctattcctccttcccgcctcttatatcctctctcctcctcctctccctcctatccctcctccctctcctcacccacctccacctttccactccgccccctctaatttcacgggtgtttcagatggtcagagtagtgttgactggcagggcctcctggcatactgaaccttgatggactcataaaggttctgatcagacattcaggttttcagcaacagagatttacttttgtctattctcccaggaccagagtagctgatacaaatgtcaaaagagggccagccacggtggctctcgcctgtaatcccagcaatttataaggccgaagtggacatatcacttgaggtcaggagttcgagaccagcatgaccaacatgggtggacccccccccgcccaacatatttactaaaaatacaaaaattagccaggtgtggtggcccatgcctgtaatcccagctgcttgggaggctgagacatgagaatcacttgaacctgggaggcagaagttgtagtgagctgagatcatgccactgaactccagcctgtctcaaaaacaaaaaccaaacaaaaaacacaaatgtcaaaagaatctcaggccaggtttccagtttaataacttgcattaaaatatactctccctggcctgtaacattcacatgtcaggtgactccattgtctctgcgagaaggagattggtggacagatcttgcctgaggtatacacttgggctgcctcttcctaggttctgggggacctccatcaccattacctttacctgctaaggtcactcctgacttttcatgtcttccacttaagctcctttagtttgacttgataagcctacatttgattggttaactgccgaccctctctcagggctgatcagttccacagactgaaaataccctccatttggggttgaaccttattcatctacatttcagaaagtgacgtgttccagtctaggcctccaagaccaatgatggtctgatgaaccattcagactcctctgcgccaattatgcttagtaccaccaggaacatttccatttctgtgaataaatgagacggtaaagaatgggagacgttcttcgcttaaagtctcagcagttgtttcccgcattcctgcttggagtatttaccacggatgctctcttcaggcagtgggttagcagggatgccctcagttcattgaaacagtaccacttgatctccagggaaagaaggggtgatctttgtttgcccacatcctcttttccagggatgcctagtgctttgttgaggggattcagcaggaatatctcctccaaaagcttctggaaactccccatgtgcccaatgtcagctcttcccgctttgagccgtccattctggttgcttctgacatgtccatgtatagtcacagaatgttagaactgggtgtgatcatgaagggttggatcaaacactccaattaaccatgtgagacaaacaccccttcagcctatcacatttcctgctggtcttgttctccaacctggtgtaatttttctactttgtaccaacctgctttcctcgagtgacttaggtatctttcaccatcctcaacttggtggatgttctcaaggtgtcagtaatcatgaataccactcatatgtgctgtttttatttctctacataacaacccaaactcagcaaagttgaaaacagaagtttgcttctcaactaatgatccaggatcatccaatgcatcaggttcttataaaaagcaactgaatgtagtctctacttttcttgaaaggtaaaattgaagagttgttgccgggtagctcaattgatgcagaaaccaggctggttcttgtcaatgccatctacttcaaaggaaagtggaatgaaccgtttgacgaaacatacacaagggaaatgccctttaaaataaaccaggtgggggaagctttttaaaatcctgctagtttgatgaagaagttgaatggaaagatttaactttgtaaaagtgtaagtgacataagcgtaagccaaaaggaatttgaaacttaaagtatttctgaatgaatttcttaactcagtagaaaaaaacggaaggagtaaaagatatttgctgcatatatatattatatatacgtatatataatatatatatatatatgtagtgttttatcactgctcttaactgcctttgataatttctcataaaccattgctgccacctagttttggaaactaaagatcttcctataagcccaatttacttggctagaaagcaaaaaaaaaaaaaaaaaagtgttaaggtagtgtgatatgtgggagtgagaggcagtatagggcagggtagagggagagaaggtgaaaacatgtgtctttaattagttatttttaaaattaaagtaagttttatttgaattgttaactaattatcattaattcagtattacaggcttttaatattaaaacttcatgacaaagaccttagttttgacattgaagtaaaacttaattaaggcaggcattagaataatttgccaaatcttccagcccctaaaaagatactattttaatgtaattaaaaaacaaaagcaggtaaccctcctgcattttttgtaaggtgtactttaacttaaaaaaattagttctctagttgcaaagggtgggaggaggagaattctaaccctggttttagaactattttaatttttataataaatgatctgtatcaattttttaaagtattacgttaataaatgtaatactttgctgagcttctatgtgcttatgcctcttctgtattttaaaaaagttatttcattagagtatcagaattgaaaagattgggttaaaatacattactacatatgtaggtcgttactctttctgagagagtgtatccatttatactccctgtcatgctgttgtggaactataagtttcatcccactttatgattttttttctcatatgttgggttggataaataggaaaaacaatacacatttttttctaattaaatcaaaacaaatttgtatttaatttcatttgattatattgctttcttagatctatttgctgagcacaatttaaatgagaaacatctttctcctctggaaaatgtagggtatcacattttattttgcagaagaaaacctttcccagggtggtactgtgtctgcttgcaatgaagataggaaggaactggttgactttttttttttttttttttttttttttttttagtgttaactggggcatgaatgtggcggtttccatcacaggtgctgaaaacactcttggaggcaactgcagctcttttgaaagttttaattgcgtctttcaataatccttcccccaggaggagcaaaggccagtgcagatgatgtatcaggaggccacgtttaagctcgcccacgtgggcgaggtgcgcgcgcagctgctggagctgccctacgccaggaaggagctgagcctgctggtgctgctgcctgacgacggcgtggagctcagcacggtaagacccgggctgcgggaagaacccagggacacctttgcgggcagaactcgagtgccacttccacctctcatattcaccttctgagttggcgatgcggcagacgcacactgtgcaggcacttggcgttgggatcgaacttttgttcaaggctgacttttcccaatattgtctgcgtgatctgccaaactacacatctcagtcctctgttttttcatcgctagaaggagtgggcggcggttaaaatgccttttaaaataaatcaggtaggaggaagcttataaaaatcctgctagtttgatgaatggcagacttttaactctaaaagcataaatgactgctcggggttattgcctcctagagttatgatgaggataaaatgtgggtaattcaggtaacaagcttaccacattgcctggcaactagtaaatgctctacaaatgtgatccattattacaatcatcattcttagcattatgcttttaaagtctaggaacctgaaatagagaatgaggaagtcttaactttgacctaacaaggctgggagggggcatccagggaggtgtgaagtccagttctcagagggtgggaccagaggcagcctctgagggcacatccaggcactcggcttcctttcagcatggatctccagggtgagagagtcaaccatggcaaatggcaggcagtgggaccccatgacttaagaggtctgtgtgcgcagcagccattggctctccctctgcccaccttcctgaaactatgctccggaaactatgcagaatctctctggggcagataatcctctggtaacctctctgctccggaaactatgcagaatctcacctgggacagataatcctgttggagtggctcacactgagagccctttcgtttccaatccttttctttactagcaatggtttgttgtctttaaaaagactatgtttgaaaaaaaaacacagtcgcctgggcattgacacttgtcacaatacaagatgtctctggagttgttggataaggagaggacagccacagccttcctgcctctgactgcttggtgtctctcccccttgtcaaggaagtggcacatgggacataggacaagtaagagtgctcacaagcttctggcagatgaaggggccactgatcctatgtgaacaaacaacacctacgtgcaaggggaggaagggaactgtgagtgcctgtgcgcttgtacatgtgcactgaagtcggaatcttaaagtctaattctggtctttcaggtggaaaaaagtctcacttttgagaaactcacagcctggaccaagccagactgtatgaagagtactgaggttgaagttctccttccaaaatttaaactacaagaggattatgacatggaatctgtgcttcggcatttgggaattgttgatgccttccaacagggcaaggctgacttgtcggcaatgtcagcggagagagacctgtgtctgtccaagttcgtgcacaagagttttgtggaggtgaatgaagaaggcaccgaggcagcggcagcgtcgagctgctttgtagttgcagagtgctgcatggaatctggccccaggttctgtgctgaccaccctttccttttcttcatcaggcacaacagagccaacagcattctgttctgtggcaggttctcatcgccataaagggtgcacttaccgtgcactcggccatttccctcttcctgtgtccccagatccccactacagctccaagaggatgggcctagaaagccaagtgcaaagatgagggcagattctttacctgtctgccctcatgatttgccagcatgaattcatgatgctccacactcgcttatgctacttaatcagaatcttgagaaaatagaccataatgattccctgttgtattaaaattgcagtccaaatcccataggatggcaagcaaagttcttctagaattccacatgcaattcactctggcgaccctgtgctttcctgacactgcgaatacattccttaacccgctgcctcagtggtaataaatggtgctagatattgctactattttatagatttcctggtgcttagccttataaaaaaggttgtaaaatgtacatttatattttatcttttttttttttttttttctgagacgcagtctggctctctgtcgcccaggctggagtgcagtggctcgatctcggctcactgcaagctccgcctcccgggttcacgccattctcctgcctcagcctcccgagtagctgggactacaggcgcccgccaccacgcccggctaattttttgtatttttagtagagacggggtttcaccgtgttagccaggatggtgtcgatctcctgacctcgtgatccacccgcctcggcctcccaaagtgctgggattacaggcttgagccaccgcgcccggctatattttatcttttatctttttctttgacatttaccaatcaccaagcatgcaccaaacactgctttaggcactggggacacaaaggggacagagccatcctcctttgacacctggtcttcagttctgtgcccaacgtatatagttttgacaatgaccaggttggactgtttaatgtctttcaacttaccacgtaatcctcttgtagggatcacatctttctttatgatattgtatttctctacctctaacagtaaaaattccattcaacccttaaagctcacttcaaattcttctttgagaagtttttcctttctccgcaaccagatgtacatatttgaactctctttgtacttggagggcacttctttcgtggtagttcttttatttttattaatctctgtatccttagatagtcctccaacaaccaaaggttgggactctgtcttacatatctgggtgcccctcatagtgcagtaataagtaagttgattatatacgagctatgtaacttatattttttaatggttggatatcactgagtttttttttttaagaatttttttattgaggtaaacttcacataacataaaattaactattttaaagtgagaagttcagtgccacttagtattgttaacaatgttgcataaccaccacctttatttaaagttccaaaaaaaatgttctcctctaaaaggaaaccccatcccattaagcagatactctccattccttccttcctccagcccccagcaaccaccaatctgctttctgtctctatggatttatctattcttgctattttatataaattgaattgtatgagaccttttgtgtctggcttctttcacttagtacaagtttttgagatttatttacatagtagcatgtatcaacacttcatttttatggccaaataaaattgtattatgtgtttatagcacaatttatttatccactcattcattgatggactttgggttgtttctgacttttggctattgggaatagtgctgctatgaatgtttgtgtacctgtatttgtttgaatgcctattttgcattctcttgggtatatatctaggagtggaactgctgggtcatatgttaattctatgtttagctttttgaggaacagacaaactgttttccacagcagttgaaccattccacattcccaccagcaatgtatgagaattccaatttctgtccacttcctcaccaacacttattattttccttttcctttttttaaaaaaaataagttatggccatcttagtgggtgtgaagtggtatctcattgtgttttttatttgcatttcctatgtaatgagctagaaactaaagtacaaactagatgggacatccagtccctttgatagataatgctgagtaaaaaatgagatgaaagacatttgtttgtttttagaacacgagtgacagtttgttaaaaagctttagaggaggaatgaaaacaaagtgaagtacacttagaaaagggccaagtggacatcttggatgtcaagtgcctagttcagtatcttttttttttttttttttttttttgagacagtgcctcactctgtcacccaggctggagtgtagtggcatgatctgggctcactgcaacctcctcctcctggattcaagcaattctcttgcttcagcctcccaagtagctgagactacaagcacccaccatcacacccagctaattttgtatttttcagtagagacggggtttcgccacattggccgtgttggtcttgaactcctggcctcaagcgatccgcctacctcagcctcccaaagtgctaggattacaggcataagccactgagcccagccctagttcagtatcttttatgtaaattacaaacatctgcaacattatgtatcatatgcagatacttattgcatttcttttattagtggtgaaagtgttctatgcatttattggctcttgaatttcctcatctatgaattgtcattcatacacctacttttctgcttcgtttttacatatgtctttgcctattaaagatattatccctctgttttatattttctctcattcttgtattgccttttaaattttgttatgatgtttcattaataaacagtgttttgttttcctctataatcaaa

SEQ ID NO: 1670 - DNA, 16107 bp, Homo sapiens
cgcggcgagcgcagcagcagggccgggtcctgcgcctcgggggtcggcgtccaggctcggagcgcggcacggagacggcggcagcgctggactaggtggcaggtgagggcgtccccgcgcacggctggggtaggggacgggagtggcgagcttcaggtccaccggctgccaccgagtgatgggaccggaggacaggagaggtcgctcagccaagagccccggggaggcggtgccttctcggtggggtcagcaacggtctctggggggtgcctgggagcggcagccggtctccgccttggcggcccacagccaccgcggacgcctccctcccggatgtctcctcgctgcccttccctggccgaagccctcccctgcagcctcctccccacctgccggccctgtgttctcactgctcttctctgctctgggatccgcaggatgacgtctgtcctgcttcttcactgtcctttacagtcaccagtctcggccgggcgcagtggctcacgcctgtaatcccagcactttgggaggccaaggcggtcggatccttggagatcaggagttcgagaccagtctggcaaacgtggtgaaaaccggtctctactaaaaatacagaaattagccgggcatggtggcccacgcctgtaataatgtcagctatgtgctgaggcaggaaaatcacttcaactcgggaggcagaggttgcagtgagctgggattgcgccactgcactccagcctggcagacagagtgagacttcgtctcaaaacaaaaaaaagaaaaacacaaaaaaaccaccaccaacaacaacaaaaaaataaagccaccagtctcggagtttcaaatctgagcactcttatccatcttaattctttcaataattcagctaaacgaatggggtcctgagaatctgcagagccaggctcagcgctcgcctgcagagcctgcggtctgtggggaccaccagcaagatgaggaatcaccttcgggaggaagggtcgtgctggggagggtcgcgccggcggggtcaagagaacctcctccagggtgggaatcagagcctccgggccgcggtgtttgagggtgagtggaattaatgccgtgatggacatggggccttctaagggggaccaacagtgtttgtgaagagttgactttgggaggggttcaggatggccagaggtggaggctgtgacctcagtgaggctggatcaagggagggggcaggtgggtaagacaccgttttaacaaggtggctttgagcggccacctttgaggggcctaagggcccctgggagatttaggaggaaggacaagaggattaagacaccgctttctgaggtgccgtgtggctgtggcgtgggggtggctgggggagtgggttgtgttcattgtccaaggctctccagcgctttgcgtggcgttttggggagcacagatgaggtgtcccgacagtggggagtggctctagggagaccagaggctcgggagggggcctgggcattagaccaggcacagaatccgaagtgggaagaaatgtgggcgtagagggcaggccttggggatgggtgtgggggaggagggggagatggaaaggagtcagggaggtctcccaggctcacctggaggagtcagggtctcatttccaagtgcactgggaactgcagcctgggggtgggggttcatttggtttcaggcctgtggccaagagacccaccccctcacattcacactttggtctccagtggcttcacaggcaccacctccttgttctcgcctgttttactcctcaccttgggctgtttcttgcctttccattctggcgttctgcagggatcagatccttcctctcacgcacaatctacactcatggcttttgctgggagtaatgagtaaagctcccaaatagatgtttctgagttaggaagcacattaaaaacaaaacaaaacgaagcaaaaccacacaattgtccaagtcccactctgtgttcaagggtcacatgatgtgcagaagctggtgatgggcaggagctctgaatggagttactgggatgtcaggccgcgtgggcctggggcaggctggctgactgggagcagcctggctccaccccggctgtccaggacgcactcacttgcctctatggatgacagctccttgcctcacagctgtctgtctctgggtcagattcagcatctcagtgtcttttgtgtatcagctgaatgtcagggaggccacaggctggtgcccagttgaaaatctcacaaggactctttgtaaatgcatgcaagaataagaacagcattttcctcctcctccctgaccccattctcctcctcagatgggacgatctggtccttacggaaagaattggagttcactgcttccagctctgtgtgtgtgtgtgtgtgtgtgtgtgtgtgtgtgtgtgtgtgtgagagagagcgagctctgcaggcgagccagttctgttgctattgctggtttgagctgctgccatcaccacacttagctaattaccttaacatttgcacttaatttttggccggagactaacagaaaataaatttttctccaatttaaaatacttacgaactttaagaagaaaacaaaaagtacgattccaaaattgccctgtagtaagtaggtcagtaacattcagggagtgtggaaactgcatttctctttattcttcccttccaggccctgcatcatggaaactctttctaatgcaagtggtacttttgccatacgccttttaaagatactgtgtcaagataacccttcgcacaacgtgttctgttctcctgtgagcatctcctctgccctggccatggttctcctaggggcaaagggaaacaccgcaacccagatggcccaggtaagcttgcccgtccgccaggagcagggactggcctgggctgcgtgttctgtcaccagcttcacactcacactccagagccactgagaaaggagggcaggactggggcccgagtgtgcactggccgtttcagggaggcggggtccactggggaagaagtggggcagggcagggaggcaggaactctgctccaccgagatttatttgggggaaactttcctcggttaatcccttggaaaagaccatccaagctgtcttgtcctagcgcagaatctttctttagaaaatgacactgaaattatttgaaacataagttgcaaagaactacctcttttttggagcaagagactttgtaactaaactttcattggtaaggaaggttaatacctgtttcaagttgtttctgtaccaacagctcagggagggcatcaacagaaatttgcaagaaggattccagggcaagtgcttcattacagctgcacactgtgcaggtactgctcagctcagtctcaccaacattcagagaacctgtggaaatgattcaagatcagtgcttgtccccagacctttgtggaaaggagaggagacatacacgtgagatgaaaccgaaaagcgccatccctgagtgcaggccgctggacacgccttcatcatgggagttgtcctttgttcaatatgactgtctttttctttgatgacgcttttcaatagtgaattactcattttaataatttcccagctcattgtgtgaagaagggagggtttatgtgtaaaggctaccagccttaataataagcacagagaggctctctaaaagatatatatatttggaaatagggcattgcaatgaaaatacgcatgccatggcaagctatgtgcacattcagggaggtgaaataacactaagatttttaaaggaaaaagtaaagaggattacataattcctttgaaataattatttttggcaaaaagatcaataacgaaggtgatgtcagtgtgaggttggatggggagttcctgggtagatgtccttgcacaagtattttgttgtgtaaggctgtgatggcctttgtgcaagagcgtaggtttttagagtcctttgtgatagttgtgttatcaggcattcaagcgtgagaaccctctcttcatggccttccctgtctgtttgtcaaaggtttttggttttgtttttttaatattagtgactccattttgattctgaagttccttatgctgaaatctgtatgatctttttctatgttttaggctcactgataaacccttatagaaagcttttttgagagcaccaaaattgtctgggtaccttcttaggtgtgagactgagctctctccatggctccagtgttcaactggatgcttgtgagacaccaaacatactgagtacacgttgctacctgtaacatgcagggaagcgttaatggcagcagaaatattttaaagaattatttatttttccttcattatataactggtaaaagtccactataaaaatttttaaaaaataaaagtagaagggaggaaaaaatccctatgaatccatcaaacagagacaaccacccttgataatgtaaagcatcttcctccagtcctatttctttttttttttttcgagacagagtcttgctctgtcgcccaggctggagtgcagtggtgcgatctcagcttactgcaagctccaccccccgagttcacaccattcttccacctcagcctcccgagtagctgggactacaggtgcccgcccccacgcccagctaatttttatttttagtagagacagggtttcactgtgttagtcaggatggtctcgatcacctgacctcgtgatccacccgccttggcctcccaaagtgctgggattacaggcgtgagccactgcgcccggccctatttcctgattttcacttgacattttgtactttggtgattatatggtatctttacttttataaatgatttttcagctaatgtgaggattcggtgagacagtccatgtaaagcaagtgctcaacatgtgttggctatgaatagtaatagtggtgtcacagcctcaggtgaaactggtcttagcttttggttctgttctatttgacagggtttctcatcaacagtctatgagctgtctaaagtaaatttagtagcttcctcttttttctatgttatagaacagtgtgtattgcatgagaaatagaaattgcttgaatattagaaaaaaaaatccctcaaaagatcatctaagcctttttagaagtaattctctctctccctcttattttttttttgttcattcattgtgactgatagattctgttttttgtttgttttgtttgttttgttttgttttttgagatagagtatctgctctgtcacccaggctggagtgcagtggtgctatctcagctcactacgacctccaactcccgagttcaagttcacgtgattctcctgcctcagcctcccgagtagctgggattacaggcacatgtcaccatgcctggctagtattcatatttttgactggcatttggtaacttataatctgtactttactgaaaataattatatagagtttttgttttaacattccctttgtttatattgctgtaacctctttttcacatataactttactttggggtgctttttcttacatgtggtgggtggctgtctgttttgtatgtatgtgtgttttcttttaaagaaccagctcttggattcattgatcattttgtgtttgtcccaaaattccttgggagtttttctgtatcttttctaacataatgattttaaagttttagcattttattactttcttggtaatattgaaaacaatgctatgttttaacttatctttggccaaactctttggtctaatatatatcacccatattttgattattttctaaatcatatgtcatatacttatttagaagaatttgtttgtttgtttgttttttgagaaggagtcttgctctgttgcccaggctggagtgcagtggtatgaccttggctcactgcaacttccgcctcctgggttcaagtgattctcctgcctcagcctcccaagtagctgggattaccagcaagcatcaccacacccggctaattttcgtatttttagtagagacaggatttcgccatcttggccaggctggtcttgaactcctgacctcaagtgatctgcccgcctcggccccccaaagtgctgggattacaggcatgagccactgtgcccagcctagaagaatattttaaatatttgtttagaagaggattttttgtgttttttttttttttttgacatggtcttgctctgtctcctaggctggagtgcagcagcttgatcatagctcactgcagcctcaaagtcctgggctccagcaatcctcccatctcagccttccaagtagctgggaccacaggcacacaccatcatgcccagctaagtggagatgggatcttgcaatgttgcccaggctagcctcaaactcttgggctcaaacaatcctcctgccttggcctccaaaagtgctgggattataggcatgagccactgtgcctggcctagaaaagtattttaatttttactttgaagagttaattatttagaaaagtgttttcagtaatattttgtaggtgattttcattttgttggcattttatttataatgctgattttttgttactacattgaagttagagaatatgatctatataattctgtatttcagaatgtattgggatgttgagacttttcttatggcccaatatgtgtgatatattttgaaatatttaatatacacacatgtagtccctatagggtacaattttaataactgtgttattgtcttattaatcacattgctcatgtaatatccttgtttccttttgaggattctgatgattgtatttccgtctatttttccatgcattttttctgcttttaactttttaactgcatctttttttttcactataaattttagaggtaattttcccaccacttagggtacatttatattttccttttgatgcaagattttatcacaacctcttttctgagcttttctcacccttgtcattttttgtgtgttactgatctttaaacaagcgagatccattcaggcagaatggctacatcttttactcgcctgttttctgtcccctctctctcctctccccagccatcaaagagctatcttgataacttttaaaattatctttcacaacaggcactgtctttaaacacagaggaagacattcatcgggctttccagtcgcttctcactgaagtgaacaaggctggcacacagtacctgctgagaacggccaacaggctctttggagagaaaacttgtcagttcctctcagtaagttgaatcaatagaacaataaaagttgcattcaacatacctggtgatatagagtctgggagaaagaccctagagaaattgagaaatttatgttaaccaatttaaaaaaattgcactatttttttttctaagatggggtctcactacgttgcccaggctggtcttaaactcctggtctcaagtgatcctcctgcctgttgggattacagatgtgagccaccacgcccagcctaaacttctttttttttttaaagactgcaattctataattataccttgcattagtattgcaaaagtagtctctacttttcttgaaaggtaaaattgaaaggtaaaattctcaagttcatttctggttattcagggttcaatacatacctattcacaaactctgatattttaacatatcttcatatgatcacttttaaagagttatgtatattctttttattaaaaaaagataacatatttagaatttttggaagtttgctgacatttgtatttagcaatgcagcctcactgaacatttttctctccaaagacgtttaaggaatcctgtcttcaattctaccatgctgagctgaaggagctttcctttatcagagctgcagaagagtccaggaaacacatcaacacctgggtctcaaaaaagaccgaaggtcagaatgacaagttattgcaccttcctcccaacccgtcctcctcctgcggctcttcctattcctccttcccgcctcttatatcctctctcctcctcctctccctcctatccctcctccctctcctcacccacctccacctctccactccgccccctctaatttcacgggtgtttcagatggtcagagtagtgttgactggcagggcctcctggcatactgaaccttgatggactcataaaggttctgatcagacattcaggttttcagcaacagagatttacttttgtctattctcccaggaccagagtagctgatacaaatgtcaaaagagggccagccacggtggctctcgcctgtaatcccagcaatttagaaggccgaagtggacatatcacttgaggtcaggagttcgagaccagcctgaccaacatggtgggaccccccccccccaacatctctactaaaaatacaaaaattagccaggtgtggtggcccatgcctgtaatcccagctgcttgggaggctgagacatgagaatcacttgaacctgggaggcagaagttgtagtgagctgagatcatgccactgaactccagcctgtctcaaaaacaaaaaacaaacaaaaaaacaaatgtcaaaagaatctcaggccaggtttccagtttaataacttgcattaaaatatactctccctggcctgtaacattcacatgtcaggtgactccattgtctctgcgagaaggagattggtggacagatcttgcctgaggtatacacttgggctgcctcttcctaggttctgggggacctccatcaccattacctttacctgctaaggtcactcctgacttttcatgtcttccacttaagctcctttagtttgacttgataagcctacatttgattggttaactgccgaccctctctcagggctgatcagttccacagactgaaaataccctccatttggggttgaaccttattcatctacatttcagaaagtgacgtgttccagtctaggcctccaagaccaatgatggtctgatgaaccattcagactcctctgcgccaattatgcttagtaccaccaggaacatttccatttctgtgaataaatgagacggtaaagaatgggagacgttcttcgcttaaagtctcagcagttgtttcccgcattcctgcttggagtatttaccacggatgctctcttcaggcagtgggttagcagggatgccctcagttcattgaaacagtaccacttgatctccagggaaagaaggggtgatctttgtttgcccacatcctcttttccagggatgcctagtgctttgttgaggggattcagcaggaatatctcctccaaaagcttctggaaactccccatgtgcccaatgtcagctcttcccgctttgagccgtccattctggttgcttctgacatgtccatgtatagtcacagaatgttagaactgggtgtgatcatgaagggttggatcaaacactccaattaaccatgtgagacaaacaccccttcagcctatcacatttcctgctggtcttgttctccaacctggtgtaatttttctactttgtaccaacctgctttcctcgagtgacttaggtatctttcaccatcctcaacttggtggatgttctcaaggtgtcagtaatcatgaataccactcatatgtgctgtttttatttctctacataacaacccaaactcagcaaagttgaaaacagaagtttgcttctcaactaatgatccaggatcatccaatgcatcaggttcttataaaaagcaactgaatgtagtctctacttttcttgaaaggtaaaattgaagagttgttgccgggtagctcaattgatgcagaaaccaggctggttcttgtcaatgccatctacttcaaaggaaagtggaatgaaccgtttgacgaaacatacacaagggaaatgccctttaaaataaaccaggtgggggaagctttttaaaatcctgctagtttgatgaagaagttgaatggaaagatttaactttgtaaaagtgtaagtgacataagcgtaagccaaaaggaatttgaaacttaaagtatttctgaatgaatttcttaactcagtagaaaaaaacggaaggagtaaaagatatttgctgcatatatatattatatatacgtatatataatatatatatattatatatacgtatatatatatattatatatatatacgtatatataatatatatatatatatgtagtgttttatcactgctcttaactgcctttgataatttctcataaaccattgctgccacctagttttggaaactaaagatcttcctataagcccaatttacttggctagaaagcaaaaaaaaaaaaaaaaagtgttaaggtagtgtgatatgtgggagtgagaggcagtatagggcagggtagagggagagaaggtgaaaacatgtgtctttaattagttatttttaaaattaaagtaagttttgatttgaattgttaactaattatcattaattcagtatttacagctttttaatattaaaacttcatgacaaagaccttagttttgacattgaagtaaaacttaattaaggcaggcattagaataatttgccaaatcttccagcccctaaaaagatactattttaatgcaattaaaaaacaaaagcaggtaaccctcctgcattttttgtaaggtgtactttaacttaaaaaaattagttctctagttgcaaagggtgggaggaggagaattctaaccctggttttagaactattttaatttttataataaatgatctgtatcaattttttaaagtattacattaataaatgtaatactttgctgagcttctatgtgcttatgcctcttctgtattttaaaaaagttatttcattagagtatcagaattgaaaagattgggttaaaatacattactacatatgtaggtcgttactctttctgagagagtgtatccatttatactccctgtcatgctgttgtggaactataagtttcatcccactttatgattttttttctcatatgttgggttggataaataggaaaaacaatacacatttttttctaattaaatcaaaacaaatttgtatttaatttcatttgattatattgctttcttagatctatttgctgagcacaatttaaatgagaaacatctttctcctctggaaaatgtagggtatcacattttattttgcagaagaaaacctttcccagggtggtactgtgtctgcttgcaatgaagataggaaggaactggttgactttttttttttttttttttttttttagtgttaactggggcatgaatgtggcggtttccatcacaggtgctgaaaacactcttggaggcaactgcagctcttttgaaagttttaattgcgtctttcaataatccttcccccaggaggagcaaaggccagtgcagatgatgtatcaggaggccacgtttaagctcgcccacgtgggcgaggtgcgcgcgcagctgctggagctgccctacgccaggaaggagctgagcctgctggtgctgctgcctgacgacggcgtggagctcagcacggtaagacccgggctgcgggaagaacccagggacacctttgcgggcagaactcgagtgccacttccacctctcatattcaccttctgagttggcgatgcggcagacgcacactgtgcaggcacttggcgttgggatcgaacttttgttcaaggctgacttttcccaatattgtctgcgtgatctgccaaactacacatctcagtcctctgttttttcatcgctagaaggagtgggcggcggttaaaatgccttttaaaataaatcaggtaggaggaagcttataaaaatcctgctagtttgatgaatggcagacttttaactctaaaagcataaatgactgctcggggttattgcctcctagagttatgatgaggataaaatgtgggtaattcaggtaacaagcttaccacattgcctggcaactagtaaatgctctacaaatgtgatccattattacaatcatcattcttagcattatgcttttaaagtctaggaacctgaaatagagaatgaggaagtcttaactttgacctaacaaggctgggagggggcatccagggaggtgtgaagtccagttctcagagggtgggaccagaggcagcctctgagggcacatccaggcactcggcttcctttcagcatggatctccagggtgagagagtcaaccatggcaaatggcaggcagtgggaccccatgacttaagaggtctgtgtgcgcagcagccattggctctccctctgcccaccttcctgaaactatgctccggaaactatgcagaatctctctggggcagataatcctctggtaacctctctgctccggaaactatgcagaatctcacctgggacagataatcctgttggagtggctcacactgagagccctttcgtttccaatccttttctttactagcaatggtttgttgtctttaaaaagactatgtttgaaaaaaaaacacagtcgcctgggcattgacacttgtcacaatacaagatgtctctggagttgttggataaggagaggacagccacagccttcctgcctctgagtgcttggtgtctctcccccttgtcaaggaagtggcacatgggacataggacaagtaagagtgctcacaagcttctggcagatgaaggggccactgatcctatgtgaacaaacaacacctacgtgcaaggggaggaagggaactgtgagtgcctgtgcgcttgtacatgtgcactgaagtcggaatcttaaagtctaattctggtctttcaggtggaaaaaagtctcacttttgagaaactcacagcctggaccaagccagactgtatgaagagtactgaggttgaagttctccttccaaaatttaaactacaagaggattatgacatggaatctgtgcttcggcatttgggaattgttgatgccttccaacagggcaaggctgacttgtcggcaatgtcagcggagagagacctgtgtctgtccaagttcgtgcacaagagttttgtggaggtgaatgaagaaggcaccgaggcagcggcagcgtcgagctgctttgtagttgcagagtgctgcatggaatctggccccaggttctgtgctgaccaccctttccttttcttcatcaggcacaacagagccaacagcattctgttctgtggcaggttctcatcgccataaagggtgcacttaccgtgcactcggccatttccctcttcctgtgtccccagatccccactacagctccaagaggatgggcctagaaagccaagtgcaaagatgagggcagattccttacctgtctgccctcatgatttgccagcatgaattcatgatgctccacactcgcttatgctacttaatcagaatcttgagaaaatagaccataatgattccctgttgtattaaaattgcagtcccaatcccataggatggcaagcaaagttcttctagaattccacatgcaattcactctggcgaccctgtgctttcctgacactgcgaatacattccttaacccgctgcctcagtggtaataaatggtgctagatattgctactattttatagatttcctggtgcttagccttataaaaaaggttgtaaaatgtacatttatattttatcttttttttttttttttttctgagacgcagtctggctctctgtcgcccaggctggagtgcagtggctcgatctctgctcactgcaagctccgcctcccgggttcacgccattctcctgcctcagcctcccgagtagctgggactacaggcgcccgccaccacgcccggctaattttttgtatttttagtagagacggggtttcaccgtgttagccaggatggtgtcgatctcctgacctcgtgatccacccgcctcagcctcccaaagtgctgggattacaggcttgagccaccgcgcccggctatattttatcttttatctttttctttgacatttaccaatcaccaagcatgcaccaaacactgctttaggcactggggacacaaaggggacagagccatcctcctttgacacctggtcttcagttctgtgcccaacgtatatagttttgacaatgaccaggttggactgtttaatgtctttcaacttaccacgtaatcctcttgtagggatcacatctttctttatgatattgtatttctctacctctaacagtaaaaattccattcaacccttaaagctcacttcaaattcttctttgagaagtttttcctttctccgcaaccagatgtacatatttgaactctctttgtacttggagggcacttctttcgtggtagttcttttatttttattaatctctgtatccttagatagtcctccaacaaccaaaggttgggactctgtcttacatatctgggtgcccctcatagtgcagtaataagtaagttgattatatacgagctatgtaacttatattttttaatggttggatatcactgagtttttttttttaagaatttttttattgaggtaaacttcacataacataaaattaactattttaaagtgagaagttcagtgccacttagtattgttaacaatgttgcataaccaccacctttatttaaagttccaaaaaaaatgttctcctctaaaaggaaaccccatcccattaagcagatactctccattccttccttcctccagcccccagcaaccaccaatctgctttctgtctctatggttttatctattcttgctattttatataaatcgaattgtatgagaccttttgtgtctggcttctttcacttagtacaagtttttgagatttatttacatagtagcatgtatcaacacttcatttttatggccaaataaaattgtattatgtgtttatagcacaatttatttatccactcattcattgatggactttgggttgtttctgacttttggctattgggaatagtgctgctatgaatgtttgtgtacctgtatttgtttgaatgcctattttgcattctcttgggtatatatctaggagtggaactgctgggtcatatgttaattctatgtttagctttttgaggaacagacaaactgttttccacagcagttgaaccattccacattcccaccagcaatgtatgagaattccaatttctgtccacttcctcaccaacacttattattttccttttcctttttttaaaaaaaataagttatggccatcttagtgggtgtgaagtggtatctcattgtgttttttatttgcatttcctatgtaatgagctagaaactaaagtacaaactagatgggacatccagtccctttgatagataatgctgagtaaaaaatgagatgaaagacatttgtttgtttttagaacatgagtgacagtttgttaaaaagctttagaggaggaatgaaaacaaagtgaagtacacttagaaaagggccaagtggacatcttggatgtcaagtgcctagttcagtatcttttttttttttttttttttttttgagacagtgcctcactctgtcacccaggctggagtgtagtggcatgatctgggctcactgcaacctcctcctcctggattcaagcaattctcttgcttcagcctcccaagtagctgagactacaagcacccaccaccacacccggctaattttgtatttttcagtagagacggggtttcgccacattggccgtgttggtcttgaactcctggcctcaagcaatccgcctacctcagcctcccaaagtgctaggattacaggcataagccactgagcccagccctagttcagtatcttttatgtaaattataaacatctgcaacattatgtatcatatgcagatacttattgcatttcttttattagtggtgaaagtgttctatgcatttattggctcttgaatttcctcatctatgaattgtcattcacacacctacttttctgcttcgtttttacatatgtctttgcctattaaagatattatccctctgttttatattttctctcattcttgtattgccttttaaattttgttatgatgtttcattaataaacagtgttttgttttcctctataatcaaa

SEQ ID NO: 1671 - DNA, 466 bp, Homo sapiens
taaacctcttctctttgtgaattacccagcctcatgtatgtggtttttttttttatagcaacacaaatgaaccaagacacagagggcacaatcatgacagaaattcttgttccgctctctgttttaatttagaggttgataatatccagtattggtgagcatacgagaaaacaggcatccttaccttgtgtgtgggaatgtggattaagggtttttggaaggaagtgggcagccttttcattttaaatggacattctttttgggccagcatctcacttttagatgtctgatctacataagtatttgcatacatgcttagatatgctaaggttttccctgtagtattttcaaaggcatttttgcagggtaatttaaaaaatcgtggtaaagaaaaacaaaatttaccatcttaagcatttctaagtgtacagttagcattgttgaatagcaaaaaaggaaagaaaaa

SEQ ID NO: 1672 - DNA, 466 bp, Homo sapiens; identical to SEQ ID NO: 1671

SEQ ID NO: 1673 - DNA, 21010 bp, Homo sapiens
cggaagtggaaacggaaacctttttagggagtccaaggtacagtcgccgcgtgcggagcttgttactggttacttggtaagctggtgtgaggggaacctgggagggtcagctccggtcctgggtcgggaggggtgggggccagaggattcagggccggaggttctggtgggggcccagtgggcgggacccgaggacggaggggccgggaggccgagaggggcggggtcgcggcggggcctgagggacggaggccgggatacttgggaaaggatccgccggccttgaactcccgcctccgccgcccctaggcctcatggcggtccgagcttcgttcgagaacaactgtgagatcggctgctttgccaagctcaccaacacctactgtctggtagcgatcggaggctcagagaacttctacaggtgcggcgggagccccggggcttacggtggcggggaggcgtgcgcaggagtcaagagctccggcagtgggagggtgccggcccctctgccccgccaccaccgagtccatgtccctacagtgtgttcgagggcgagctctccgataccatccccgtggtgcacgcgtctatcgccggctgccgcatcatcgggcgcatgtgtgtgggtaaggcaggtggaggacgccgagggagggagtggtctccaagcaccattaattacacccccggagggaacccggagtgacctagggattcccagggtatcatctgttatctctgggcactatagaatctctcaggccaagcgtcaggagatcggggcaaccctctagcaaaggctgctggataatagtaataacaaataatgtaaagtgctttcactcctgttctcattccttcgtcacaaagacactagaaggtaggagttactggcctaacttgactgatgaggaagttgagacttgacctaagtgactcagtaagttccacacctagttcctagtgttggagaaggatttttctcttttttttttttttttgaggccagatttttgctctttcgcccaggctggagtgcagtggcaagatcacagctgtctgcatcctcaacttcttaggctcaagtgatcctcccacctcagcctaccaggtagctagggccacaggcacgtgccaccacacctggctaatttttacatttttggtagagacgcggcctccctgtgttgcccagcctggccttgatctcctgggctcaagtgatcttcttaccttggtctcttaaagtgttgggattataggcgagagccactatacccagccgaggatttgtatctcatctctccctgccactgactgggcaaggtgctttctctttctaagcatccatttctgtctctgtaaagattagctaagatatgcggtcttcctgctcagttacgttggaatcttaaattccctttaccacatctctaccctaccttcctacctgtcagcactgttaattctggtcgttggtcctttcctttttattattattattatttttttttgagatggagttttcgctcttgttgcccaggctggagtgcaatggcacgatcttggctcactgcaacactctcttcaagtgattctcctgcctcagcctcccaagtagctgggattacaggcgcatcccgccacacccggctaatttttttgtatttttagtagagatggagtttcaccatgttggccaggctggtcttgaactcctgacctcaggtgatcctcccacctcggcctcccaaagtgctgggattacaggcgtgagccactgcgcccggccggtcctttcattaagctggatctgtcttccattactgctgcccattgtttcttagttctgctcattgaggtcacttttagaagtctgtttattttatttttttacttttactttaatttttaaaaatcttaagcctgcttgggaggtcgaggcaggtggatcacctgaggtcagcagttcgagactaacctgaccaacatggagaaaccccgtctctactaaaaatacagaaattagccgggtgtggtggcgcatacctataatcccagctacttgggaggctgaggcgggagaattgcttgaaccctggaggtggagctcaccctgcggtgagctgagattgtgccattgcatttcagcctgggcaataagagtgaaactgtgtctcaaaaaaaaacaaaaaacaaaaaacaacaacaacaaaaacttaagcctagtgacctcaaagtattttcctattcagttaaaatactctgatctctaaccatgcccttaggacttgaagcaagttctgacaacaagggagattttagcttagtccttgtgtattttatgatgggagtgacctggaattcagaaattgattggcgtgtatttgtagattgttcattcttgttgctgtatggtgtgttttgtgtaagtatatcacaacgtattcatccattccatcgacagtgcatttgggcagttttcactttggtctgttaggaatagtgctgctggccgggcatggtggctcacgcctgtaatcccagcactctgggaggccgaggcgggcggatcacgaggtcgggagatcgagaccatcctggttaacacggtgaaaccccgtgtctactaaaaatacaaaaaaattagccaggtgtggtggcgggtgcctgtagtcccagctacttgggaggttgaggcaggagaatggtgtgaaccggggaggtagaacttgcagtgagccgagattgtgccactgcactccagcctgggcaacagaacaagactccgtctcaaaaaaaaaaaaaaaagtaatagtgctgctatgtttttttagtgaacacatgtacatatttctactgggtatatgatacctaagagtggcatggcagagtcacaggttatgtgactatttagtagtagttgcagatgatgccagataattatctaaagtgattgaccaacttacactcctgtctcagtatgagagttcagttgctccatatatctttgccaacacttggaattgatgacttgtaaaaattttagtcattctggctgggggcagtggctcacacctgtaatcgtagcactttgggaggtcgaggtgggcggatcacctgaggttaggagttcgagaccagcctggccaacatagtgagaccccatctctacaaaatcacaaaaagttagccaggtgtggtggcacgcacttgtaattccagctactcaggaggccgaagcaggagaatcacctgaacccaggatgcagaagttgcagtgagctgagatcgcaccactgcgctccagcctgggtgacagagtgagactctgccttaaaaaataataatctagccattctgctatgtgtgtagtgttagctcagttttttttgtttttttgttttttttttttggagacggagtttcgctctgtcacccaggttggagtgcagtggcgcgatctcggctcactgcaagctccgcctcccgggttcacgccattctcctgcctcagcctcccgagtagctgggactacaggcgcccgccaccacgcctggctaattttttgtatttttagtagagacggggtttcaccgtgttagccaggatgatctcgatctcgatctcctgaccttgtgatctgcccacctcagcctcccaaagtgctgggattacaggcgtgagccaacacgcccggcagctcagtttttaagtagcaaaatatacagctaatgccaagagctcagcttccctcccagttggtgatggtgaagtaggcaggatttattgggattcctgggtggtctctggcctgccctgggtgttttccagatcagtgggttggagggctgggctctgggcctaaagctttcctgggaaagctgattgggctgggctgagtggtatcctcagcccctagggctcagcaggcatcttgtgtattcaccctctaatttgggtttctccagggaacaggcacggtctcctggtacccaacaataccaccgaccaggagctgcaacacattcgcaacagcctcccagacacagtgcagattaggcgggtggaggagcggctctcagccttgggcaatgtcaccacctgcaatgactacgtggccttggtccacccagacttggacagggtgaggcagcccaacttgacccaagagtcacagggccatcctagtcagtggttagccactgttctttcccaacaggcagcaattaggggtctctcctgtggtttttctatatgggctcttgagtttcaggtactcattggaatagtgataacagaggccttatcaagtgtcagaaagaagctggggagggtatgaatccttcatgattggggagattgaaccatccagtcctgcatcctgggccaggataggtgattgactgttgaacttttgactgtgggtgagaggggaaagaagtgatattgagaccagcctccagctgttcagggcatgcatgaatattaggggcttcacagctgcccttgactctgctctaagctgtacttcctcctttctctgggtgaggctttcatatgaggtacagaggagaaatgaggggctcagggagccaaggcctggatgcttctgggcatggagaaccttggttctggggctgtaagttctgagccctgaacacaatatctttgattgacaggagacagaagaaattctggcagatgtgctcaaggtggaagtcttcagacagacagtggccgaccaggtgctagtaggaagctactgtgtcttcagcaatcagggagggctggtgcatcccaagacttcaattgaagaccaggatgagctgtcctctcttcttcaagtcccccttgtggtaagcattcctgtcctctgaaccccgtctcccgaggcagatccttttgcctagtgtttgggagtctgggtcattacctgccacagtttgggactggggctgcaggtcagggaggagcagggtttggggagagtcttcattgaggagggagagaatttggtgccgtgactcacattgagcccatcccttggcaggcggggactgtgaaccgaggcagtgaggtgattgctgctgggatggtggtgaatgactggtgtgccttctgtggcctggacacaaccagcacagagctgtcagtggtggagagtgtcttcaagctgaatgaagcccagcctagcaccattgccaccagcatgcgggattccctcattgacaggtacctggggcctctcctttcttctgctcagggttgggggttaacttgcattttgagagtatggggaaaagatgtcatctagaatgggagcctaccagtttgttctggtagcttctcgagtgtgagagcatatctgtacactgctgagcagataagagccagcatattcaaaaaatatttcttgagcatctgctaatcctcatctttgtggtttttcagggctaggatactagagcagtagctgcttgagcagcttgtcagagctggtcccgggatgagggctgaggcaggcacctcacttgagagtgaggtgggctctgtgaaacagctactgaccgtgcgctttcctttctcttcagcctcacctgagtcaccttccaagttgttccatgggctcctggctctggactgtggccaaccttctccacattccgcccaatctgtaccggatgctggcagggaggtggcagagagctcactgggactgaggggctgggcacccaacccttttccacctgtgcttatcgcctggatctatcattactgcaaaaacctgctctgttgtgctggctggcaggccctgtggctgctggctgagggttctgctgtcctgtgccaccccattaaagtgcagttccctccgggccattctgaatgtgatgtttggggccctcagcctgtgtacaatccctgcactctccagttgttccagcattctgggaagatagggtgggatgaacacaacacacacccaacccagttcaccacctccacacacgccattcccttctcctctaccatcaggatgtgaggcttcatcctggggcaagaaacactctccactacagttctccttttttcttttttctttttgaggcagtgtctccctctgtcacccaggctggagtgttgtgacgcaaggatggctcactgtagccttgacctgttgggctcaagcgatcctctcgcctcgtttatttttttgtagaaacgaagtcactgtgttgcccaggctggtttatactcctgaactcaagcgacccaccgcctcggcctcccaaagtgttgggattacaggcgtgagccacggcgcccggtctagttctcacagttttcacccgacttctgcgccggtcttctctggccttgaaaggcagagagtccgttccgattttcccctgagctgggcaagtcccctgtgagagctctggggcatctggcttcggggcattctttgactaaggtggatggaggttgcaggtcttttcctgggtgggcgtggggcggggcagcgggttcccagcgtcctcctggcctgggcgtcttggaggctgttgggatgcattccgtccccttgcgcggggcggggccttgaggcgctggggcgggattggcgggggacggtcgcggagccccgccccgaagcacagggtcgagtcccttctttccgctccaacgcacggagggtgaggtcggtacgcggtggtggcgtcacggcgccagctcctcccgacgccgaggtgggttccgggagacccgcgggtctggctgcgagaggtgagggcagagccggggcggggccctagcggggtgtcccggcgacccagaccttaaagggcttctcttcttgcagaccatgggggctcagctaagcggcggccgcggcgccccggagcctgcgcaaacccagccccagccccagccccagcctgcggcgccggagggcccggaacagccccggcatccgccccagccccagccccagccccagccccagccccagcccgagcccagcccgtgggggccgctggacgacgtgcgcttcctcatcgcctgcacttcctggtactgacggcgtcctccgcaggatgtcgcccgtctgtccgccgtcccctgtggttcttgcctgccttgtctcctctccccacgtccctgcgtctcttacaccccctcccacccgaggctccccagagatagcagagaattcgaagaggtcgccggggactggaaagaagtcccggcagggccgccttcgcagtctacaccccagcctgcttcccagcctacacccagacccagctcagaccttcgtgaccaccccatccctttctccggctggctgggtcgggggcatccctctctgtcgctggcttccagaggcaggacaggcctcctggtaagcccgcaaagttgctgacctcctgacttcgtctgccttttattaatatctgtattgctgataaccgtgctcttgactatgtgtcccaggtcatgtcccaggtcatggagaagcccgtgccacagtgaccctccccatactcctgggggggctgctctccatcctggatcgtaaggaggcatcatcaggctgtgttcctggaaccccaataaccctgggcccccagggccagcctgttgtagagggaggctatctgaccgccggtctggcagaggagatgggtgggcagctcccagacaccccaaaggacccggttctcttcccagagcgtcctaaggttactcttggaacctgatctttgttccctcatcccagggaaatgacacactctgtatttctgttttatttagaaatgatttaaaaaacattatacaaaggctgatcagtttaaaatgtgactgacactgaaatgctgtgatgtcccccaggctgaggggaagctaggctctggggcccccagtgctttgcccctctgtctgccctgtcctggggtgatggacaaacagatgaccacaggcaggagaatctgagattggaagcctctaggctgagccctctgggcctggccccacatccctcacctctgcagcctgggctgcctgcctccatctcctgttcattctcagctggcctgccaggagccaatggggagcctggcgggaggcgggggtgcctagagctttcaagaagtgagagcaccaacctgaggagtggacagggaccaggaagtgggggaagggaggccaggaagaggtggatacaggagacacttctcatctcatctcagaccctagaggggtccacagatggggacacaagacccagccagcccactggatggcccgggcaagtaacaacctctctgtgcttcatctgagggcacggtgagagttaccgtcggcctcccagggcctaacacgagtttcatgtgagtggacaggtgtgagctaataaagtgctttgcaaagtataaaacactgtacaaacctatgaatcactaatatctccgcagttgttccctgcctgtcccagggagcctgcccttggccaaaatgagaaaaaacaaggatgatgacaggggacacagcggacccacatgggcacctctgggacaagagattttgcttgagacagctcccagggcagcaggagtccctgtctgtgctacagggtaagccgaccccaatcccagagaccacagggtcgggggcaaggcccatgcaggctcagtgagcaggggtggcatccgagacccggccagcacgctggagactgcctgacacctttttggctttggcagagagccagtgggcattgatgaacccattggccttgtctagggctcctcagtgacaagcagggctgcctccgccgtactgtggagcaaggcaggccaagccctaggaactcctgctggagacagtgaagggcgggccagtgaaggtcaaaaagggagccccctcagcttggggctgctaccggtaggggtgtccttctaagagcagtgtgggaagatgggcccagtgagcgaggtcagcaagggccaagctctgggaaaacactgcttccagccgagagattgagtcggcctcagagtagctggagtcggcctcagagtagtgggggcactgagcacttcagacgccctggtccccttccgaaggactcccaggctctgccagtgttggccctgcagccatctctgcctcacctaactggtgaggctgagctccaggctgcaagtgacagactggagcaaagctggggacagtgacaatagaggggagtggaggacggtcacaaactcggatcttcctccagaaatggggtcagcttctgccccagctctgtagccataggagcagagctcagctactggggtgtctgggcgctagagtggccttagcagcaccttggtccttgtcgcctgggggagggccgctatgctggcctcatcaccaagacagtcacctctagttcacctaaagcctcaagcagcctttgcaaaatgggacagtagtgacaggacatttaaatattcacgatgtgacagctgggtccttgtcagacccagctgggccacagccctgcctgcagcatgtgaccctaaatcctgggtctccgaagagaccctgacaagtggagcaggtttcctgagggatctgccgtctgccagcagggaaacccaggcttgttgctcactgtgtcagaagcaggggtcctgtagccttggaggacagtggggtgggggtagggggacatctgaccagcaggtgttggcaaaaggggaccaggactggtggtatctcccggatgggggatgagagctagtgctggcttcccacagagggtgctgggttccagccaggagtggagctgtggtacctcatggacaccacaggatgccgtgaccacaggggctcctcctggcatggtccctgcctccggatggagcctggcctattcccttaagtagggagtagtttgcccaggacagaaggctggcagctgggtgccagacacccaccctggggcacagcccccataattccctgccccacgctcagcctaggccaatgcacccaccacttcagctgtacgaccccagcctagggccctgctggccctggtgagcactggccagagctgcccctcagaccctggtgaggaagggcctggctggccagaccaagtggatagagagggctctgggctgctcacacccattcctggactggccgcttatagtaggtgacaggctgagggcctgtcttgttcttgaactggaagatggtgtagaccagcaccaggatgcagagggacaggatgcaggggatgaccacggccacggcgttcacggagcccggcacatcgttgatggtcaccatgatgtccacgtcgtcctggggcagccgccgctccttccgccgctccacctccttctggttgcagcccatccagtcacgcaggatgttgcgcgggtagcctggctccacgctcagtttctggttgtcaaacttccagtagtcccggcccttgtagaaataggtgtaatctgcagaaatacagcccagcatcaccactcccagacacttccggcacctgctctggggcagtgtgaaaaggagggcacaggcactgtggcaagggaggcaaggtgggcacacctggaggtttggggtgcagtgcttggctgagtcatggagtaagaagctgcagagggggacacccgggacctggagtggtccgcctgtcatctacgggtgctaggaaaccagaggggcttcagggagaactgggacatggttcactttgtgctgcccagacaggaccccttgcacgcaagcctgggtcacagctctgtcacactgtgcgcacaggtcccccttgccccgctcatgtgggctccattaagcctcagcctggctcctgcttgagccaagggaggcagggagcaagatttcaccttgtgttgacagcaagacctctctgcaattatggatttttttggcttggcacacatcacttcacaacacagatgcaggacctttgggagccttctgggagagaggctgggcagccctgccaatcactccctgggcaaccaccccagggctcgagcaacagcctgagcggcccagccagtgggcaaagcagcttgcttaggccgtcctcattggctggcttcccaccgtggctagggctttcattggtctcggtccttgatgtcacctgtctctgaggctccccaaaaagggagatcttgtgcgtaaagcatcaggtatacaagacagccaacaaatagcagctgtggccattggctttctcagcagtgaagcctcctcagagactccttcccagccatctctaacacggccccctctagctcgttgctctctcccagcatttatttcctttttttttttttttaagacaaggtctcactccattgcctaggctggagtacagtggtgcagttgtaactcactgcagcctcaaactcctggtcttaagcaatcctctggcctcagcctcccaagtagctgggactacaggcacatgtcaccacgcccagctaatttttgtattttttttttgtagagatgaatctcactatgttactcaggctggtctcgaactcctggcctcaagtgatcctcccacctcagcctcccaaagtgctgggagtctttcccttatagcgtctgttgccatcttgctttatgcccctagacttggacgtctgcaagtcctgttgactgctacgtccccagctcccaccacacaagctgtctattattatggagtgagtgaatgaatcctgtcaatccacataaactgaaacccatgatgatgacaatgatgatgacgatagcagctaaaatatacagcatggatggtgtgctaggcattatttctaagtatgctacataatttgtcttctttaatcctcacaaaaccattatataaaggtaggtactgttattatcattttataaatgagaaaacagaaaacttattaaagatttgctcagattcatagtgagtggtactatggtggttacgaacccagccagtccagctctagagtctgtgtttttgaccatatcaatggagatctatttaacaaacactcctggaggcccactctgcatctggccaggctagcagctcctcctgagaagctcctaggctggtggggagacaggctgagtgtctgatggcagtcgtgggggctggtggccagcatggcttctaggaggagttcaggaaacataaaaagtttctctcttgatgcagtggctcacacttgtaatcccagggctttgggaggctgaggtgggaggattgcttgaggccaggagtttgagaccagcctggccaacatagtgaaaccctgttgctacaaaaaaatgtaaattagccaggcacagtggcatgtgcctataatcccaactactcgggaggctgatgaggcaggaggatcatttgagactaggaggttgaggctgcagtgagctatgatcatgccacagcattccagcctaggcgacagagtgagaccttatctcttagaatttaaaaaaaaattttttttgaaggttttctttccatcttcttgccctcgagccctgtgaaaaagtggctttgaaacatgcatgcccatcattgcttttcagattgggtaactcaaggcgtccctggagtacactgaggataagtgtttgagaaatgctgtctgaaggaatgaagtcagtctatgacaacgtctctctgccgtgaatcattcctgcagatgaaaaagtgtgacttggcagctggtaagtgaattaatggaccacgtgaacatgggtagatatgaggcagttgtctgccaccaggtgttttttcaaacctggacgcccatgggcactgagtatgcccgtgggcactggtgaggaccacataaaaccggctccccatgcccaccctggcccggcccttacgtacatccttccttgctgatgaaggctccttggggagcctgtgggatgcccttccacacggtgatgggcttagggtagccagggtccgtggcccgccgctcctcgctgtagcgccagtaccgctcgcctttgaaaaagtaggtcttgcccacaggttcccagcgcagagctgtgtcaatgccttcacggggcaaacagctgcccagctcccccaggctgtgggggtacccaggctccaccgtcacctccttaaacacccaatacttgtcacctgtggccaagaggagcccaggatcagcttccccagtcactcagtgccgtttgcccatcttcagggtgtcaggtgaaaacagtctgatgccctcagccccttggcccagttagagttgggaagggcacgaagcctgaggccagtcacagatcctggacaacttgcctctgctgcctgggctccgagtcccaccctcttttgttcatgtgacttgctcctctctcctctctggtgatctcagccacttacatgactttgcatatgcactaccactccccaaacctgctaccagtgacacccgactctgaggctctcccactggacctgagcagcagagccagaaaccctgacctccctcggcctaccggcagctctgcattggctggctccccagagctcctcatctgcaccacagaggggctccctcctcatcaccttctgcctcccaggtccccaacagggagtcctagcctcactgttgaccctctctttccttctcctctcagtattcagccacttcttttttttaagatggagtttggctcttgttgcccaggctggagtgcaatggtgtgatctcagctcaccacaacctccacttcctgggttcaagcgattctcctgcctcagcctcctgagtagctaggattacaggcacgtgccaccatgcttggctagtttttgtaattttagtagagacgtggtttcaccatgttggtcaggctggtctcaaactcctgacctcaggtgatctgccagccttggcctcccaaagtgctgggatttcgggcgtgagccactgcgcctggccgagtattcagccacttctgaggccctctgactctcctggcagctgtcccctgcccttcagctgcacggctcctccctcatttgggcctcatgagtggcgcgctccagaaccacctcagaaatggctgccctgcccctgccatgtctgtcacctcctgccctctggctctctgctgctcggaaacattccatgaatttccagccttggcctaatggatcaagaccacattctggcctggcagccagggctcttcaggatttgcctccaaatgacctttctgggccatttctcacagctttccaaggcggggcctccgtggccatcaggtgggccttctaagccctgtggccgtccgtacacatcccagccctgctcctttattcagccgttgtccctctggaatgccttccttgcttctcactatctgtatctcacccatctgaggtctggcccgagtcaagataactgtcatgaaacaacctagcacagtgctgggtacagggtgggcaccttagctccctcccacaccctcccccgacctccccagcttgagtgacctcttccctctgggttcttacagaactgacccgatggcctcccatgaggtactgggtggtcttcaattgcttgtcccacactctacttcatgtggacgaagctggtcaccccaccaatctcggcacatacagattctcagtctcactttctgacttgatttgtcagaggtcagtgtctccgttagactagaggggccctctgaggacatctgcctcccaccccgcctcttccagtttagatgggaaaaaggaggtcccaagaccttgggcagggaactgtcccacagcacagtctacattacctttgaagaagacaaatctcccatcggccctttcataggctgcgtcgatgcgggcaggcaggcccttccagaactgctcgatctgcatggggtagccctcctgcactcggttattgcgcagacgccagaaccagcgatcctgggaggaagcgggagagggggagagaggtgtgtcaggccctgcctccgaacccagtgattgcagctgtggggcttaggtcccaacagcccagccctccaccgagactgtccattagctgcttctgacttttaaagccctgggaggaagacaggatgctcctgtaactgtcttcaattcagcctcctgctgactcttgctgctgggtggacaatgagacaaacagcagacaggcctggtgtggaaaaggaggtgtgagggagccggaaaggatgatgttggggcctggagtggccacatgggggcagtggagcgtcactgacatcagccagactggtcctcgggacagtgggaggctggggtggtcactgagcctgggccgagcgccctccatgaggctggctccatccagcagggccaggatcatggaagccaagtcatgggaattccctcgagacctgggcatgaattcacattcctccatttatagctgcatgacctaggcctcacctgcaagtgcaggtaataatggagaatcagatgagagattctaggcaaaatgcccagaccagtacggggcacacagtccatgttgagtaaatggcagctaaatagtccgagtccagtaaaaacgcctcttgtaactggtgcctcagtcttgggctggtacacaagcagtctaggcaaggcctgtagcctccaggcctcagttttctttctttttttttttttttagatggagtctcgctctgtcacccaggctggagtgcagtggcgcaatctcggctcactgcaagctccgcctcccaggttcatgctattctcctgcctcagcctcctgagtagctgggactacaggcgcccgccaccacacccggctaattttttatatttttagtagagatggggtttcaccatgttagccaggatggtcttgatctcctgaccttatgatccgccctccttggcctcccaaagtgttgggattgcaaggcgtgagccactgcgcccagcctccaggcctcagttttcttatgtgtaaatggggatgataaaacccggacctgcctatgaacggttcagttggatcaaagtagaatgagtgcagaagaagaagcatgatttgtaaaagatggtacaaaagctagtattttaaaaggtgttttacaaagcactttcacatccaggtttttgaccttattttgactttcatgtctctgttaagttgatctgagatatacggagtcttaagaaaggccaggtgacttgcctagagccactcagtgagaagccagactggggctgactcacgctgcccgattcctgcgcagtgctcagtgcgtgctgggagaactccacaaggggagcgaggcagcctctttcaccatcctgtgtgatggagccaccctgcccagatccccttcagagaagggcttgttgccccagtggccagcagtgtggccagcaggcagttttcaactgtcagcccctttggggatgttccctgcttcagagagctctcctcagtcactggatgcccttcctcatccagtgattgaatgaggtaggggttataatgttccagatattttggacccaacgtaggctgagtgacaggccaccgtagccccagagctccctgcgggggtggctgaggctgccatgggcctctgttgccacttaacctctccctcttccctgtcctgcttccttctccccctcacaaatgttgattctgaaagtactctctaatcgaaatcctgcattccagaccccacctcagagttcactccccgagagcccaacctgcaacacgtcaagcagactgccaccctgtcagtccatggctgatggaggacagatgacaagatataccctgggctgctgccagtagcagcccctcaagccttggtagggtctggagtcagactcagccaccactgacctagcccctactccaagttgaccatcttcagagccgggtactcactggatcttcacacactctttgttagaggaatgactcccccaggtttcggatggagaaactgaggtcccaagaagggtggtcacagaccagaagccagcttccagcactttctcccagcattaaccccaggggaggtgagggatcacccatctttccccctccctcttgggaacagttgattcacccagcagcactaggaagagaccccatgccctggccactgggctagctcctgtccaggccccattgtaatcgaatcccaaatcaggagccttccccagctccatgatgtcggggaggaggaggaaaggtcaggggccagctgggtggtgccaatccattggccctaccttaaagacaaacatctcgccccggaagagggccactgtgttgaagttgccgtcacagatgttgggtttggtgcctggtgtggatggccggtccccgaggggcggccgagggggcctgggctggcgctcgtgtttcctctccgatggtgagtggatcctgcggacggggagtgtagggagtggccttgtgggctccagaggctcggctgggggtcctggagagaggagctgcatcttagagagggggcagccgtttcccgcctcccattgccagtctcagcatcacccaggcagctctgagacaagtctgtcccagttcagcctcctgttccctctccccagtttaactcccccagtctttgagaaaatggatgaaaatagccattagaatgggactctcatctttccatccccgaatctggtatcttctcttttctctctcctgttacagagcaatcatgtccttccttagggtcagcgctcttccttaggccataccctctttgcccccttcacacgcactggccccacttcctcacccccttcatttattctctttcccaccccagtgcagcttctacccgtcacccactccaactgctctgccaagatcatccaatggttacttgactcagactttaataagcacatgcatcatctggggatgttgctaaaatgcagatgagggctcagagggcctggggtggggcctgagagtttgcattccttcacactctcaggtgatgctgatgctgctggtctgaagactacattttgagcagcaagattcatagaaacactttcctggaaacactctcttggttgtcctcctgcctcatgggctgttctttctcagtctcctttgctggctgcgtgtcctcatctgccctactctagaggctggcgtgcccttgggtcctcttctcttccgtctctacattttcatccttaggtcagtgcttcttcacttgggctgcatattaggatcacctttgggagcttttcaaactggatgttcaggaagcaccaggccagctctccaacttttttttttttttttttttttttgagaaggagtctcgctccgtcccccatgctggagtgcagtggcgtgatctaagctcactgcaacctctgcctcccaggttcaagtgattctcctgcctcatcctcccaagtagctgggactacaggcacgtaccaccacacccaggtgattttttttttttttttttttttttttagcagagatggggtttcaccatgttgaccaggctggtcttgaactcctgacctcaagtgatccacccaccttggcctcccaaagtgctgggattacaggcgtgagccaccacgcccaatacccaactattaataaaaccaaatctctagagctgagggctgggtgtctgtgtttttttattagaatcccaaggtaattccaaagggcagccaagttgagaatcactgctctaggtggtctcatccaggctcatggctttacagacctgcatcagagctgtccagtagagtgttctgtgatgatggaaatggtccatatctgcatcgttcactacagtagcccctagccacagccacatatggctactgaggtcttaagatgaatgactagttcttagtgtgactgagacccactaaagaactataactgaaatgataattttaatatatttttgggggggtagagacaggggtctcactttgttgcccaggctggtcttgaactcctggcctcaagcaatcctcccacctcggcctcccaaagcgctaggattacaggtttgagccaccgcgcccggcctaataaatataaatttaaatttcattactatgaaatttaatactagtttatttaatagtagtttatttaatacatactagtgtatgactagtggttactgtattgaacaacaaagatcccaaataagtattccagcctagattttttttttttttgagacggagtctcactctgtcgcctaggctggagtgcagtggtgtgatctcagctcactgcaacctccgcctcccgggttcaagtgattctcctgcctcagcctcccaagtagctgggattataggcgtgcaccaccatgccaggctaattttttgtatttttagtagagacagggttttgccatgttggccaggctagacttgaactcctgacctcaggtaatcgcccgcctcggcctccagcctagaattttgagctgcagactggtggaccctattgcttcacaattacaaaagctggaaaccctgggggcatccttgaccctccctccttcctctcaccccatgtctgatctgtcagcagatcctgttgttctacctttggaatagcttctgggacccacagcccccacctggtctctgctgctttacttgtggaggtcctgcctgtcctccagggctctggctgggtcatctcctccagagggagccctccttctgtgctccgtagcctgtgggctgtgggtgcctgtgctgtcttgacaagcatttgctcaagtaaactggtctccctagctcacctgacttgaccagaacaagaacctcacataccagtgtgaacagaactgggagagaggtgtgtaggaggcctttcatatcttacctagatagcagtagcttctcatctttcaccttttctttctttttttttttttttttttttttttttttttgagacggagtctcgccctgttgcccaggctggagtgcagtggtgcgatctcagctcactgcaacctctgcctcctgggttcaagtgattctcctgcctcagcctcccaagtagctgagatttcacttgcccaccaccacacctggctaatttttttgtttgtttgttttaatatttttggtagagatggggtttcaccatgttggccagactggtctcaaactcctgacctcaagtgacctgcctgcctcagcctcccaaagtgctgggatttcaggcaagagccaccacgcctggccctcgttttttctttttaaagaacaaagctctggttatagtccccatcacgctgtatcaccgttactcctgcagatgtgtgaacctgcctggctagaggtggaatctatgggagcactcagtcaccatctggtgtgggagggagggagagaagcatgaagggacggggaagagtgtggaaggggaggggtaaaggagagggaatgggtggccctcacctcacttttgtccctctcagttacagctcagaccctcccctaggtttcccaggtgtgccaggggaagccttgccctctggccaggcaaagccattggaagtctgtaaaggtcacacacagagaaacagcagcagtgctgatgatagcaacgtccccctccctcgtcccctgccccatgacaggtaggcagtcacagcccagccccgaggaaggagcagtcccccctctccctgccacacaccatagatcttctggatgccctggagatcgtcctggggcagcttgaagttgtgcgtctccatgtactggtagaagggcgccatgatggcgctggggtcgctggagtgctccagtcccagcgcgtggcccagctcatgcacagccaccaggaagaggtcgttccc

SEQ ID NO: 1674 - DNA, 21024 bp, Homo sapiens
cggaagtggaaacggaaacctttttagggagtccaaggtacagtcgccgcgtgcggagcttgttactggttacttggtaagctggtgtgaggggaacctgggagggtcagctccggtcctgggtcgggaggggtgggggccagaggattcagggccggaggttctggtgggggcccagtgggcgggacccgaggacggaggggccgggaggccgagaggggcggggtcgcggcggggcctgagggacggaggccgggatacttgggaaaggatccgccggccttgaactcccgcctccgccgcccctaggcctcatggcggtccgagcttcgttcgagaacaactgtgagatcggctgctttgccaagctcaccaacacctactgtctggtagcgatcggaggctcagagaacttctacaggtgcggcgggagccccggggcttacggtggcggggaggcgtgcgcaggagtcaagagctccggcagtgggagggtgccggcccctctgccccgccaccaccgagtccatgtccctacagtgtgttcgagggcgagctctccgataccatccccgtggtgcacgcgtctatcgccggctgccgcatcatcgggcgcatgtgtgtgggtaaggcaggtggaggacgccgagggagggagtggtctccaagcaccattaattacacccccggagggaacccggagtgacctagggattcccagggtatcatctgttatctctgggcactatagaatctctcaggccaagcgtcaggagatcggggcaaccctctagcaaaggctgctggataatagtaataacaaataatgtaaagtgctttcactcctgttctcattccttcgtcacaaagacactagaaggtaggagttactggcctaacttgactgatgaggaagttgagacttgacctaagtgactcagtaagttccacacctagttcctagtgttggagaaggatttttctcttttttttttttttttgaggccagatttttgctctttcgcccaggctggagtgcagtggcaagatcacagctgtctgcatcctcaacttcttaggctcaagtgatcctcccacctcagcctaccaggtagctagggccacaggcacgtgccaccacacctggctaatttttacatttttggtagagacgcggcctccctgtgttgcccagcctggccttgatctcctgggctcaagtgatcttcttaccttggtctcttaaagtgttgggattataggcgagagccactatacccagccgaggatttgtatctcatctctccctgccactgactgggcaaggtgctttctctttctaagcatccatttctgtctctgtaaagattagctaagatatgcggtcttcctgctcagttacgttggaatcttaaattccctttaccacatctctaccctaccttcctacctgtcagcactgttaattctggtcgttggtcctttcctttttattattattattatttttttttgagatggagttttcgctcttgttgcccaggctggagtgcaatggcacgatcttggctcactgcaacactctcttcaagtgattctcctgcctcagcctcccaagtagctgggattacaggcgcatcccgccacacccggctaatttttttgtatttttagtagagatggagtttcaccatgttggccaggctggtcttgaactcctgacctcaggtgatcctcccacctcggcctcccaaagtgctgggattacaggcgtgagccactgcgcccggccggtcctttcattaagctggatctgtcttccattactgctgcccattgtttcttagttctgctcattgaggtcacttttagaagtctgtttattttatttttttacttttactttaatttttaaaaatcttaagcctgcttgggaggtcgaggcaggtggatcacctgaggtcagcagttcgagactaacctgaccaacatggagaaaccccgtctctactaaaaatacagaaattagccgggtgtggtggcgcatacctataatcccagctacttgggaggctgaggcgggagaattgcttgaaccctggaggtggagctcaccctgcggtgagctgagattgtgccattgcatttcagcctgggcaataagagtgaaactgtgtctcaaaaaaaaacaaaaaacaaaaaacaacaacaacaaaaacttaagcctagtgacctcaaagtattttcctattcagttaaaatactctgatctctaaccatgcccttaggacttgaagcaagttctgacaacaagggagattttagcttagtccttgtgtattttatgatgggagtgacctggaattcagaaattgattggcgtgtatttgtagattgttcattcttgttgctgtatggtgtgttttgtgtaagtatatcacaacgtattcatccattccatcgacagtgcatttgggcagttttcactttggtctgttaggaatagtgctgctggccgggcatggtggctcacgcctgtaatcccagcactctgggaggccgaggcgggcggatcacgaggtcgggagatcgagaccatcctggttaacacggtgaaaccccgtgtctactaaaaatacaaaaaaattagccaggtgtggtggcgggtgcctgtagtcccagctacttgggaggttgaggcaggagaatggtgtgaaccggggaggtagaacttgcagtgagccgagattgtgccactgcactccagcctgggcaacagaacaagactccgtctcaaaaaaaaaaaaaaaagtaatagtgctgctatgtttttttagtgaacacatgtacatatttctactgggtatatgatacctaagagtggcatggcagagtcacaggttatgtgactatttagtagtagttgcagatgatgccagataattatctaaagtgattgaccaacttacactcctgtctcagtatgagagttcagttgctccatatatctttgccaacacttggaattgatgacttgtaaaaattttagtcattctggctgggggcagtggctcacacctgtaatcgtagcactttgggaggtcgaggtgggcggatcacctgaggttaggagttcgagaccagcctggccaacatagtgagaccccatctctacaaaatcacaaaaagttagccaggtgtggtggcacgcacttgtaattccagctactcaggaggccgaagcaggagaatcacctgaacccaggatgcagaagttgcagtgagctgagatcgcaccactgcgctccagcctgggtgacagagtgagactctgccttaaaaaataataatctagccattctgctatgtgtgtagtgttagctcagttttttttgtttttttgttttttttttttggagacggagtttcgctctgtcacccaggttggagtgcagtggcgcgatctcggctcactgcaagctccgcctcccgggttcacgccattctcctgcctcagcctcccgagtagctgggactacaggcgcccgccaccacgcctggctaattttttgtatttttagtagagacggggtttcaccgtgttagccaggatgatctcgatctcgatctcctgaccttgtgatctgcccacctcagcctcccaaagtgctgggattacaggcgtgagccaacacgcccggcagctcagtttttaagtagcaaaatatacagctaatgccaagagctcagcttccctcccagttggtgatggtgaagtaggcaggatttattgggattcctgggtggtctctggcctgccctgggtgttttccagatcagtgggttggagggctgggctctgggcctaaagctttcctgggaaagctgattgggctgggctgagtggtatcctcagcccctagggctcagcaggcatcttgtgtattcaccctctaatttgggtttctccagggaacaggcacggtctcctggtacccaacaataccaccgaccaggagctgcaacacattcgcaacagcctcccagacacagtgcagattaggcgggtggaggagcggctctcagccttgggcaatgtcaccacctgcaatgactacgtggccttggtccacccagacttggacagggtgaggcagcccaacttgacccaagagtcacagggccatcctagtcagtggttagccactgttctttcccaacaggcagcaattaggggtctctcctgtggtttttctatatgggctcttgagtttcaggtactcattggaatagtgataacagaggccttatcaagtgtcagaaagaagctggggagggtatgaatccttcatgattggggagattgaaccatccagtcctgcatcctgggccaggataggtgattgactgttgaacttttgactgtgggtgagaggggaaagaagtgatattgagaccagcctccagctgttcagggcatgcatgaatattaggggcttcacagctgcccttgactctgctctaagctgtacttcctcctttctctgggtgaggctttcatatgaggtacagaggagaaatgaggggctcagggagccaaggcctggatgcttctgggcatggagaaccttggttctggggctgtaagttctgagccctgaacacaatatctttgattgacaggagacagaagaaattctggcagatgtgctcaaggtggaagtcttcagacagacagtggccgaccaggtgctagtaggaagctactgtgtcttcagcaatcagggagggctggtgcatcccaagacttcaattgaagaccaggatgagctgtcctctcttcttcaagtcccccttgtggtaagcattcctgtcctctgaaccccgtctcccgaggcagatcctttcgcctagtgtttgggagtctgggtcattacctgccacagtttgggactggggctgcaggtcagggaggagcagggtttggggagagtcttcattgaggagggagagaatttggtgccgtgactcacattgagcccatcccttggcaggcggggactgtgaaccgaggcagtgaggtgattgctgctgggatggtggtgaatgactggtgtgccttctgtggcctggacacaaccagcacagagctgtcagtggtggagagtgtcttcaagctgaatgaagcccagcctagcaccattgccaccagcatgcgggattccctcattgacaggtacctggggcctctcctttcttctgctcagggttgggggttaacttgcattttgagagtatggggaaaagatgtcatctagaatgggagcctaccagtttgttctggtagcttctcgagtgtgagagcatatctgtacactgctgagcagataagagccagcatattcaaaaaatatttcttgagcatctgctaatcctcatctttgtggtttttcagggctaggatactagagcagtagctgcttgagcagcttgtcagagctggtcccgggatgagggctgaggcaggcacctcacttgagagtgaggtgggctctgtgaaacagctactgaccgtgcgctttcctttctcttcagcctcacctgagtcaccttccaagttgttccatgggctcctggctctggactgtggccaaccttctccacattccgcccaatctgtaccggatgctggcagggaggtggcagagagctcactgggactgaggggctgggcacccaacccttttccacctgtgcttatcgcctggatctatcattactgcaaaaacctgctctgttgtgctggctggcaggccctgtggctgctggctgagggttctgctgtcctgtgccaccccattaaagtgcagttccctccgggccattctgaatgtgatgtttggggccctcagcctgtgtacaatccctgcactctccagttgttccagcattctgggaagatagggtgggatgaacacaacacacacccaacccagttcaccacctccacacacgccattcccttctcctctaccatcaggatgtgaggcttcatcctggggcaagaaacactctccactacagttctccttttttcttttttctttttgaggcagtgtctccctctgtcacccaggctggagtgttgtgacgcaaggatggctcactgtagccttgacctgttgggctcaagcgatcctctcgcctcgtttatttttttgtagaaacgaagtcactgtgttgcccaggctggtttatactcctgaactcaagcgacccaccgcctcggcctcccaaagtgttgggattacaggcgtgagccacggcgcccggtctagttctcacagttttcacccgacttctgcgccggtcttctctggccttgaaaggcagagagtccgttccgattttcccctgagctgggcaagtcccctgtgagagctctggggcatctggcttcggggcattctttgactaaggtggatggaggttgcaggtcttttcctgggtgggcgtggggcggggcagcgggttcccagcgtcctcctggcctgggcgtcttggaggctgttggggtgcattccgtccccttgcgcggggcggggccttgaggcgctggggcgggattggcgggggacggtcgcggagccccgccccgaagcacagggtcgagtcccttctttccgctccaacgcacggagggtgaggttggtacgcggtggtggcgtcacggcgccagctcctcccgacgccgaggtgggttccgggagacccgcgggtctggctgcgagaggtgagggcagagccggggcggggccctagcggggtgtcccggcgacccagaccttaaagggcttctcttcttgcagaccatgggggctcagctaagcggcggccgcggcgccccggagcctgcgcaaacccagccccagccccagccccagcctgcggcgccggagggcccggaacagccccggcatccgccccagccccagccccagccccagccccagccccagccccagcccagcccgagcccagcccgtgggggccgctggacgacgtgcgcttcctcatcgcctgcacttcctggtactgacggcgtcctccgcaggatgtcgcccgtctgtccgccgtcccctgtggttcttgcctgccttgtctcctctccccacgtccctgcgtctcttacaccccctcccacccgaggctccccagagatagcagagaattcgaagaggtcgccggggactggaaagaagtcccggcagggccgccttcgcagtctacaccccagcctgcttcccagcctacacccagacccagctcagaccttcgtgaccaccccatccctttctccggctggctgggtcgggggcatccctctctgtcgctggcttccagaggcaggacaggcctcctggtaagcccgcaaagttgctgacctcctgacttcgtctgccttttattaatatctgtattgctgataaccgtgctcttgactatgtgtcccaggtcatgtcccaggtcatggagaagcccgtgccacagtgaccctccccatactcctgggggggctgctctccatcctggatcgtaaggaggcatcatcaggctgtgttcctggaaccccaataaccctgggcccccagggccagcctgttgtagagggaggctatctgaccgccggtctggcagaggagatgggtgggcagctcccagacaccccaaaggacccggttctcttcccagagcgtcctaaggttactcttggaacctgatctttgttccctcatcccagggaaatgacacactctgtatttctgttttatttagaaatgatttaaaaaacattatacaaaggctgatcagtttaaaatgtgactgacactgaaatgctgtgatgtcccccaggctgaggggaagctaggctctggggcccccagtgctttgcccctctgtctgccctgtcctggggtgatggacaaacagatgaccacaggcaggagaatctgagattggaagcctctaggctgagccctctgggcctggccccacatccctcacctctgcagcctgggctgcctgcctccatctcctgttcattctcagctggcctgccaggagccaatggggagcctggcgggaggcgggggtgcctagagctttcaagaagtgagagcaccaacctgaggagtggacagggaccaggaagtgggggaagggaggccaggaagaggtggatacaggagacacttctcatctcatctcagaccctagaggggtccacagatggggacacaagacccagccagcccactggatggcccgggcaagtaacaacctctctgtgcttcatctgagggcacggtgagagttaccgtcggcctcccagggcctaacacgagtttcatgtgagtggacaggtgtgagctaataaagtgctttgcaaagtataaaacactgtacaaacctatgaatcactaatatctccgcagttgttccctgcctgtcccagggagcctgcccttggccaaaatgagaaaaaacaaggatgatgacaggggacacagcggacccacatgggcacctctgggacaagagattttgcttgagacagctcccagggcagcaggagtccctgtctgtgctacagggtaagccgaccccaatcccagagaccacagggtcgggggcaaggcccatgcaggctcagtgagcaggggtggcatccgagacccggccagcacgctggagactgcctgacacctttttggctttggcagagagccagtgggcattgatgaacccattggccttgtctagggctcctcagtgacaagcagggctgcctccgccgtactgtggagcaaggcaggccaagccctaggaactcctgctggagacagtgaagggcgggccagtgaaggtcaaaaagggagccccctcagcttggggctgctaccggtaggggtgtccttctaagagcagtgtgggaagatgggcccagtgagcgaggtcagcaagggccaagctctgggaaaacactgcttccagccgagagattgagtcggcctcagagtagctggagtcggcctcagagtagtgggggcactgagcacttcagacgccctggtccccttccgaaggactcccaggctctgccagtgttggccctgcagccatctctgcctcacctaactggtgaggctgagctccaggctgcaagtgacagactggagcaaagctggggacagtgacaatagaggggagtggaggacggtcacaaactcggatcttcctccagaaatggggtcagcttctgccccagctctgtagccataggagcagagctcagctactggggtgtctgggcgctagagtggccttagcagcaccttggtccttgtcgcctgggggagggccgctatgctggcctcatcaccaagacagtcacctctagttcacctaaagcctcaagcagcctttgcaaaatgggacagtagtgacaggacatttaaatattcacgatgtgacagctgggtccttgtcagacccagctgggccacagccctgcctgcagcatgtgaccctaaatcctgggtctccgaagagaccctgacaagtggagcaggtttcctgagggatctgccgtctgccagcagggaaacccaggcttgttgctcactgtgtcagaagcaggggtcctgtagccttggaggacagtggggtgggggtagggggacatctgaccagcaggtgttggcaaaaggggaccaggactggtggtatctcccggatgggggatgagagctagtgctggcttcccacagagggtgctgggttccagccaggagtggagctgtggtacctcatggacaccacaggatgccgtgaccacaggggctcctcctggcatggtccctgcctccggatggagcctggcctattcccttaagtagggagtagtttgcccaggacagaaggctggcagctgggtgccagacacccaccctggggcacagcccccataattccctgccccacgctcagcctaggccaatgcacccaccacttcagctgtacgaccccagcctagggccctgctggccctggtgagcactggccagagctgcccctcagaccctggtgaggaagggcctggctggccagaccaagtggatagagagggctctgggctgctcacacccattcctggactggccgcttatagtaggtgacaggctgagggcctgtcttgttcttgaactggaagatggtgtagaccagcaccaggatgcagagggacaggatgcaggggatgaccacggccacggcgttcacggagcccggcacatcgttgatggtcaccatgatgtccacgtcgtcctggggcagccgccgctccttccgccgctccacctccttctggttgcagcccatccagtcacgcaggatgttgcgcgggtagcctggctccacgctcagtttctggttgtcaaacttccagtagtcccggcccttgtagaaataggtgtaatctgcagaaatacagcccagcatcaccactcccagacacttccggcacctgctctggggcagtgtgaaaaggagggcacaggcactgtggcaagggaggcaaggtgggcacacctggaggtttggggtgcagtgcttggctgagtcatggagtaagaagctgcagagggggacacccgggacctggagtggtccgcctgtcatcctacgggtgctaggaaaccagaggggcttcagggagaactgggacatggttcactttgtgctgcccagacaggaccccttgcacgcaagcctgggtcacagctctgtcacactgtgcgcacaggtcccccttgccccgctcatgtgggctccattaagcctcagcctggctcctgcttgagccaagggaggcagggagcaagatttcaccttgtgttgacagcaagacctctctgcaattatggatttttttggcttggcacacatcacttcacaacacagatgcaggacctttgggagccttctgggagagaggctgggcagccctgccaatcactccctgggcaaccaccccagggctcgagcaacagcctgagcggcccagccagtgggcaaagcagcttgcttaggccgtcctcattggctggcttcccaccgtggctagggctttcattggtctcggtccttgatgtcacctgtctctgaggctccccaaaaagggagatcttgtgcgtaaagcatcaggtatacaagacagccaacaaatagcagctgtggccattggctttctcagcagtgaagcctcctcagagactccttcccagccatctctaacacggccccctctagctcgttgctctctcccagcatttatttcctttttttttttttttaagacaaggtctcactccattgcctaggctggagtacagtggtgcagttgtaactcactgcagcctcaaactcctggtcttaagcaatcctctggcctcagcctcccaagtagctgggactacaggcacatgtcaccacgcccagctaatttttgtattttttttttgtagagatggaatctcactatgttactcaggctggtctcgaactcctggcctcaagtgatcctcccacctcagcctcccaaagtgctgggagtctttcccttatagcgtctgttgccatcttgctttatgcccctagacttggacgtctgcaagtcctgttgactgctacgtccccagctcccaccacacaagctgtctattattatggagtgagtgaatgaatcctgtcaatccacataaactgaaacccatgatgatgacaatgatgatgacgatagcagctaaaatatacagcatggatggtgtgctaggcattatttctaagtatgctacataatttgtcttctttaatcctcacaaaaccattatataaaggtaggtactgttattatcattttataaatgagaaaacagaaaacttattaaagatttgctcagattcatagtgagtggtactatggtggttacgaacccagccagtccagctctagagtctgtgtttttgaccatatcaatggagatctatttaacaaacactcctggaggcccactctgcatctggccaggctagcagctcctcctgagaagctcctaggctggtggggagacaggctgagtgtctgatggcagtcgtgggggctggtggccagcatggcttctaggaggagttcaggaaacataaaaagtttctctcttgatgcagtggctcacacttgtaatcccagggctttgggaggctgaggtgggaggattgcttgaggccaggagtttgagaccagcctggccaacatagtgaaaccctgttgctacaaaaaaatgtaaattagccaggcacagtggcatgtgcctataatcccaactactcgggaggctgatgaggcaggaggatcatttgagactaggaggttgaggctgcagtgagctatgatcatgccacagcattccagcctaggcgacagagtgagaccttatctcttagaatttaaaaaaaaattttttttgaaggttttctttccatcttcttgccctcgagccctgtgaaaaagtggctttgaaacatgcatgcccatcattgcttttcagattgggtaactcaaggcgtccctggagtacactgaggataagtgtttgagaaatgctgtctgaaggaatgaagtcagtctatgacaacgtctctctgccgtgaatcattcctgcagatgaaaaagtgtgacttggcagctggtaagtgaattaatggaccacgtgaacatgggtagatatgaggcagttgtctgccaccaggtgttttttcaaacctggacgcccatgggcactgagtatgcccgtgggcactggtgaggaccacataaaaccggctccccatgcccaccctggcccggcccttacgtacatccttccttgctgatgaaggctccttggggagcctgtgggatgcccttccacacggtgatgggcttagggtagccagggtccgtggcccgccgctcctcgctgtagcgccagtaccgctcgcctttgaaaaagtaggtcttgcccacaggttcccagcgcagagctgtgtcaatgccttcacggggcaaacagctgcccagctcccccaggctgtgggggtacccaggctccaccgtcacctccttaaacacccaatacttgtcacctgtggccaagaggagcccaggatcagcttccccagtcactcagtgccgtttgcccatcttcagggtgtcaggtgaaaacagtctgatgccctcagccccttggcccagttagagttgggaagggcacgaagcctgaggccagtcacagatcctggacaacttgcctctgctgcctgggctccgagtcccaccctcttttgttcatgtgacttgctcctctctcctctctggtgatctcagccacttacatgactttgcatatgcactaccactccccaaacctgctaccagtgacacccgactctgaggctctcccactggacctgagcagcagagccagaaaccctgacctccctcggcctaccggcagctctgcattggctggctccccagagctcctcatctgcaccacagaggggctccctcctcatcaccttctgcctcccaggtccccaacagggagtcctagcctcactgttgaccctctctttccttctcctctcagtattcagccacttcttttttttaagatggagtttggctcttgttgcccaggctggagtgcaatggtgtgatctcagctcaccacaacctccacttcctgggttcaagcgattctcctgcctcagcctcctgagtagctaggattacaggcacgtgccaccatgcttggctagtttttgtaattttagtagagacgtggtttcaccatgttggtcaggctggtctcaaactcctgacctcaggtgatctgccagccttggcctcccaaagtgctgggatttcgggcgtgagccactgcgcctggccgagtattcagccacttctgaggccctctgactctcctggcagctgtcccctgcccttcagctgcacggctcctccctcatttgggcctcatgagtggcgcgctccagaaccacctcagaaatggctgccctgcccctgccatgtctgtcacctcctgccctctggctctctgctgctcggaaacattccatgaatttccagccttggcctaatggatcaagaccacattctggcctggcagccagggctcttcaggatttgcctccaaatgacctttctgggccatttctcacagctttccaaggcggggcctccgtggccatcaggtgggccttctaagccctgtggccgtccgtacacatcccagccctgctcctttattcagccgttgtccctctggaatgccttccttgcttctcactatctgtatctcacccatctgaggtctggcccgagtcaagataactgtcatgaaacaacctagcacagtgctgggtacagggtgggcaccttagctccctcccacaccctcccccgacctccccagcttgagtgacctcttccctctgggttcttacagaactgacccgatggcctcccatgaggtactgggtggtcttcaattgcttgtcccacactctacttcatgtggacgaagctggtcaccccaccaatctcggcacatacagattctcagtctcactttctgacttgatttgtcagaggtcagtgtctccgttagactagaggggccctctgaggacatctgcctcccaccccgcctcttccagtttagatgggaaaaaggaggtcccaagaccttgggcagggaactgtcccacagcacagtctacattacctttgaagaagacaaatctcccatcggccctttcataggctgcgtcgatgcgggcaggcaggcccttccagaactgctcgatctgcatggggtagccctcctgcactcggttattgcgcagacgccagaaccagcgatcctgggaggaagcgggagagggggagagaggtgtgtcaggccctgcctccgaacccagtgattgcagctgtggggcttaggtcccaacagcccagccctccaccgagactgtccattagctgcttctgacttttaaagccctgggaggaagacaggatgctcctgtaactgtcttcaattcagcctcctgctgactcttgctgctgggtggacaatgagacaaacagcagacaggcctggtgtggaaaaggaggtgtgagggagccggaaaggatgatgttggggcctggagtggccacatgggggcagtggagcgtcactaacatcagccagactggtcctcgggacagtgggaggctggggtggtcactgagcctgggccgagcgccctccatgaggctggctccatccagcagggccaggatcatggaagccaagtcatgggaattccctcgagacctgggcatgaattcacattcctccatttatagctgcatgacctaggcctcacctgcaagtgcaggtaataatggagaatcagatgagagattctaggcaaaatgcccagaccagtacggggcacacagtccatgttgagtaaatggcagctaaatagtccgagtccagtaaaaacgcctcttgtaactggtgcctcagtcttgggctggtacacaagcagtctaggcaaggcctgtagcctccaggcctcagttttctttctttttttttttttttagatggagtctcgctctgtcacccaggctggagtgcagtggcgcaatctcggctcactgcaagctccgcctcccaggttcatgctattctcctgcctcagcctcctgagtagctgggactacaggcgcccgccaccacacccggctaattttttatatttttagtagagatggggtttcaccatgttagccaggatggtcttgatctcctgaccttatgatccgccctccttggcctcccaaagtgttgggattgcaaggcgtgagccactgcgcccagcctccaggcctcagttttcttatgtgtaaatggggatgataaaacccggacctgcctatgaacggttcagttggatcaaagtagaatgagtgcagaagaagaagcatgatttgtaaaagatggtacaaaagctagtattttaaaaggtgttttacaaagcactttcacatccaggtttttgaccttattttgactttcatgtctctgttaagttgatctgagatatacggagtcttaagaaaggccaggtgacttgcctagagccactcagtgagaagccagactggggctgactcacgctgcccgattcctgcgcagtgctcagtgcgtgctgggagaactccacaaggggagcgaggcagcctctttcaccatcctgtgtgatggagccaccctgcccagatccccttcagagaagggcttgttgccccagtggccagcagtgtggccagcaggcagttttcaactgtcagcccctttggggatgttccctgcttcagagagctctcctcagtcactggatgcccttcctcatccagtgattgaatgaggtaggggttataatgttccagatattttggacccaacgtaggctgagtgacaggccaccgtagccccagagctccctgcgggggtggctgaggctgccatgggcctctgttgccacttaacctctccctcttccctgtcctgcttccttctccccctcacaaatgttgattctgaaagtactctctaatcgaaatcctgcattccagaccccacctcagagttcactccccgagagcccaacctgcaacacgtcaagcagactgccaccctgtcagtccatggctgatggaggacagatgacaagatataccctgggctgctgccagtagcagcccctcaagccttggtagggtctggagtcagactcagccgccactgacctagcccctactccaagttgaccatcttcagagccgggtactcactggatcttcacacactctttgttagaggaatgactcccccaggtttcggatggagaaactgaggtcccaagaagggtggtcacagaccagaagccagcttccagcactttctcccagcgttaaccccaggggaggtgagggatcacccatctttccccctccctcttgggaacagttgattcacccagcagcactaggaagagaccccatgccctggccactgggctagctcctgtccaggccccattgtaatcgaatcccaaatcaggagccttccccagctccatgatgtcggggaggaggaggaaaggtcaggggccagctgggtggtgccaatccattggccctaccttaaagacaaacatctcgccccggaagagggccactgtgttgaagttgccgtcacagatgttgggtttggtgcctggtgtggatggccggtccccgaggggcggccgagggggcctgggctggcgctcgtgtttcctctccgatggtgagtggatcctgcggacggggagtgtagggagtggccttgtgggctccagaggctcggctgggggtcctggagagaggagctgcatcttagagagggggcagccgtttcccgcctcccattgccagtctcagcatcacccaggcagctctgagacaagtctgtcccagttcagcctcctgttccctctccccagtttaactcccccagtctttgagaaaatggatgaaaatagccattagaatgggactctcatctttccatccccgaatctggtatcttctcttttctctctcctgttacagagcaatcatgtccttccttagggtcagcgctcttccttaggccataccctctttgcccccttcacacgcactggccccacttcctcacccccttcatttattctctttcccaccccagtgcagcttctacccgtcacccactccaactgctctgccaagatcatccaatggttacttgactcagactttaataagcacatgcatcatctggggatgttgctaaaatgcagatgagggctcagagggcctggggtggggcctgagagtttgcattccttcacactctcaggtgatgctgatgctgctggtctgaagactacattttgagcagcaagattcatagaaacactttcctggaaacactctcttggttgtcctcctgcctcatgggctgttctttctcagtctcctttgctggctgcgtgtcctcatctgccctactctagaggctggcgtgcccttgggtcctcttctcttccgtctctacattttcatccttaggtcagtgcttcttcacttgggctgcatattaggatcacctttgggagcttttcaaactggatgttcaggaagcaccaggccagctctccaacttttttttttttttttttttttttgagaaggagtctcgctccgtcccccatgctggagtgcagtggcgtgatctaagctcactgcaacctctgcctcccaggttcaagtgattctcctgcctcatcctcccaagtagctgggactacaggcacgtaccaccacacccaggtgatttttttttttttttttttttttttttttagcagagatggggtttcaccatgttgaccaggctggtcttgaactcctgacctcaagtgatccacccaccttggcctcccaaagtgctgggattacaggcgtgagccaccacgcccaatacccaactattaataaaaccaaatctctagagctgagggctgggtgtctgtgtttttttattagaatcccaaggtaattccaaagggcagccaagttgagaatcactgctctaggtggtctcatccaggctcatggctttacagacctgcatcagagctgtccagtagagtgttctgtgatgatggaaatggtccatatctgcatcgttcactacagtagcccctagccacagccacatatggctactgaggtcttaagatgaatgactagttcttagtgtgactgagacccactaaagaactataactgaaatgataattttaatatatttttgggggggtagagacaggggtctcactttgttgcccaggctggtcttgaactcctggcctcaagcaatcctcccacctcggcctcccaaagcgctaggattacaggtttgagccaccgcgcccggcctaataaatataaatttaaatttcattactatgaaatttaatactagtttatttaatagtagtttatttaatacatactagtgtatgactagtggttactgtattgaacaacaaagatcccaaataagtattccagcctagattttttttttttttgagacggagtctcactctgtcgcctaggctggagtgcagtggtgtgatctcagctcactgcaacctccgcctcccgggttcaagtgattctcctgcctcagcctcccaagtagctgggattataggcgtgcaccaccatgccaggctaattttttgtatttttagtagagacagggttttgccatgttggccaggctagacttgaactcctgacctcaggtaatcgcccgcctcggcctccagcctagaattttgagctgcagactggtggaccctattgcttcacaattacaaaagctggaaaccctgggggcatccttgaccctccctccttcctctcaccccatgtctgatctgtcagcagatcctgttgttctacctttggaatagcttctgggacccacagcccccacctggtctctgctgctttacttgtggaggtcctgcctgtcctccagggctctggctgggtcatctcctccagagggagccctccttctgtgctccgtagcctgtgggctgtgggtgcctgtgctgtcttgacaagcatttgctcaagtaaactggtctccctagctcacctgacttgaccagaacaagaacctcacataccagtgtgaacagaactgggagagaggtgtgtaggaggcctttcatatcttacctagatagcagtagcttctcatctttcaccttttctttctttttttttttttttttttttttttttttgagacggagtctcgccctgttgcccaggctggagtgcagtggtgcgatctcagctcactgcaacctctgcctcctgggttcaagtgattctcctgcctcagcctcccaagtagctgagatttcacttgcccaccaccacacctggctaatttttttgtttgtttgttttaatatttttggtagagatggggtttcaccatgttggccagactggtctcaaactcctgacctcaagtgacctgcctgcctcagcctcccaaagtgctgggatttcaggcaagagccaccacgcctggccctcgttttttctttttaaagaacaaagctctggttatagtccccatcacgctgtatcaccgttactcctgcagatgtgtgaacctgcctggctagaggtggaatctatgggagcactcagtcaccatctggtgtgggagggagggagagaagcatgaagggacggggaagagtgtggaaggggaggggtaaaggagagggaatgggtggccctcacctcacttttgtccctctcagttacagctcagaccctcccctaggtttcccaggtgtgccaggggaagccttgccctctggccaggcaaagccattggaagtctgtaaaggtcacacacagagaaacagcagcagtgctgatgatagcaacgtccccctccctcgtcccctgccccatgacaggtaggcagtcacagcccagccccgaggaaggagcagtcccccctctccctgccacacaccatagatcttctggatgccctggagatcgtcctggggcagcttgaagttgtgcgtctccatgtactggtagaagggcgccatgatggcgctggggtcgctggagtgctccagtcccagcgcgtggcccagctcatgcacagccaccaggaagaggtcgttccc

SEQ ID NO: 1675 - DNA, 437 bp, Homo sapiens
ggctctgggtgctttaagaatgtctgggagggtcgagcagggattctgaggagagaggggtcatttaaacctggaggaagatgttcagggaaagcttcacaaaggtgaagttgaagctcagtcttgaaggatcagaagttagtcaggagaacggattcagggggcaggagaggaagggtgggggtggcattcctggcggatggaatgcaataaacacagtccagagacaggcagtttcattccacctggctctggaacaaagcaggaggggagggccggagagagatgaggtcagccaggctggaaagcagggcgcttaatgccatacaaaggaatttggatcagcttcttggctagtggggggtttaagtaggagtgggggtggtgatacaattaaatcactctggctgcagttgagggaggattagagggaacaa

SEQ ID NO: 1676 - DNA, 854 bp, Homo sapiens
ccaggccctgaaggatggggaggttttggacagagggaggagagagttagaaaaatttttggtagagagaatcaggtgaaagagatgccctaaagaggactgagtgggtctgaggtgaatgagtgaggaagagcagagtatgtggatacccggaaacacacacacacacacatcatcattatcatcatcatcattgtcgtcgtcatcatcttgctgagtcatcatcatcatcatcatcattgtcgtcgtcatcatcttgctgagtgtctcttgaagtacaggctgtgacaggttgtgggccattttcctgaactcaccacttacccgggatagtaaacatgatacacatcaataaaggcagactttattgtgaatcacagcgcctggtgtatcctgaactttgaggagttatgggagggacacgttgggggaatgggaagggcaccattcaggccaattatggggaaacccctggaggagggtgaatgccgaaggaggaattgggggagtccaggggctccaagttaccactgtgacattttgagagaacccggggcttttgcagattctacaaaatgtgggccaagttcatcctgtccaagtgtgcagcagggcccttggcccccatcactatcctggggacagaagttggctgctgagtgagtgatagaggccgtgcgagaggcacatcgtggaagccaaccagcacccacatccttgcccaccctggacccctttccagccttttcctgagcccctgcttcctcagtcctcccctctctccagcacctgcagcctggctgcctttccgtctctggctgcgctctttctccagcctcggtctggccgcactt

SEQ ID NO: 1677 - DNA, 437 bp, Homo sapiens; identical to SEQ ID NO: 1675

SEQ ID NO: 1678 - DNA, 854 bp, Homo sapiens; identical to SEQ ID NO: 1676

SEQ ID NO: 1679 - DNA, 670 bp, Homo sapiens
tcggcacagtgacagaggcacccagggctcagcaagctcatggcccagcttgttggactcagagggcagaagaatcacattctaaacatgataaggtatagccagcaggaggcagattcccagattgattctccagagccttgtaggtcccaagggtgcctatgacaccaatgggaatctgaaccaacacagacagcacagtcttcttaggagaccctagtgcagcagcgctggcctcctcctgagcgtgcacgcttatatggcttctgagctggccaggctacttcatgcatttggtttaatgggtcctcgtaaggcaggagaatcttcttgaacttggagttgggtctgtggtccattggtcagtactttgttcagaggcactgagggtgggaaggctcatggagctggattctgctgctgggaagctgggtgggccttgtttgtgggcctcaggttcaggactgaatgagagtcctcttgttgcgagttgagggtgtactctgggcatgccatgccctttttttgtactaagagggtagaaaagcaaagaccagactagttggcaaattggaacccaactacccagtttatttatttcttaggcgtagaaggaataatttagggggaactgaagagccaacctaaaggaaaaaaataaaataaaggg

SEQ ID NO: 1680 - DNA, 670 bp, Homo sapiens; identical to SEQ ID NO: 1679

SEQ ID NO: 1681 - DNA, 24413 bp, Homo sapiens
ccggctcgcggcgcgtggaggctgctcccagccgcgcgcgagtcagactcgggtgggggtcccggcggcggtagcggcggcggcggtgcgagcatgtcgtggctcttcggcattaacaagggccccaagggtgaaggcgcggggccgccgccgcctttgccgcccgcgcagcccggggccgagggcggcggggaccgcgggttgggagaccggccggcgcccaaggacaaatggagcaacttcgaccccaccggcctggagcgcgccgccaaggcggcgcgcgagctggagcactcgcgtgagtgcggcggggcggggcggggcgggcgggcgggcgggacgggccggggaagcgggagccctggcccttgccgctcctcgctgctgtcggcagccacttcccgggcgagactgcgcccccggagcacccccggccggagccgtctcgcgtgccgggaggatcggactctttccgtcacccgtttgcacctctgcagctgtcaggagcgggtcaggtgcgaaaagcggtgcggaggtggcgctcataggttacaggggtcagggtctggggctggccgtggtcttcagttaccgccgagcgtgcgggatccttctgcgcttgccgcctccacgtggcacaggccaaggcgtggccagatgggtagatgggtttgttgggtggttgctagcagtttccacgtaacaagggaagcgtatttgagagttacttgattctaacgagactagcagatttgcacttcttgttggaagacgttagcatttgcacggcgaggtctgtgaagccacaggccaggccgtgctgctcagcttgagtaaacccctgacccaaggccctcagggtgtgagcactgactgcaccttccctaagctcgggtctcttcccccagccttcctttcccctgtggctttaacgatttgtagcacgatgcagttcaaatggctaggagtctggaacgtagaaggtgctgaattcattgaaagaatacagtggttctcaactcttgtttaagccggggttctttctatttatttatatattgagacacagtatcgccctgtcgccgaggctggagtgcagtggtgcgatttcggctccctgcaacctccgcctccgattctcctgccgcagcctctcgagtagctgggattacagccgcgcagcaccacgcccggctaattttttttgtatctttagtagagacgggtttcaccatgttggccagggtgctctccaactcctgacctcgtgatccgcccgccttgtcctcctgaagtgttgggattacaggcctgagccacagcgcccagacagaagggattccttttttttttttttttttttttttgagatgagtctcgctctgtcgcccaggctggagtgcagtgacgtgatctccactcactgcaagctccgcctcccgtgttcacaccattctcctgcctcagcctcccgaatagctgggagtacaggcgcccgccaccacgcccggctaattttgtagagatggggtttcaccgtgttagccaggatggtctcgatctcctgacctcgtgattaattttttgtatttttagtagagacggggtttcactgtattagccagggtggtctcgatctcctgacctcgtggtccacccgcctcggcctcccaaagtgctgggattacaggcgtgagccaccgcatgccacctttttttttttaagatgatgtcttgctctttggccaggctggagtgcaatggcgccatcttgtctcactgcaaaccgcaacgccctggttcaaagaattctgctgcctcagcctcccaagtagctgggattacaggcacgcgccaccacgcccagctaatttttgtatttttagtagagacgtggtttcaccaccttggccagggtggtcttgaccacctgaccccgtgatccacccgcctcgacctcccaaagtgatgagattacagtcctgagccaccgcaccctgccagcaggggttcctttttagaaagaagatcatttagggaatccctggtgtgaagcagatataaacagagtttccctgtttaaggagggatggcctggtggtacttgtggttccatcctgtgcccttccccggggtgctggggaacatcctgagctgaggtttctggccccggctgggtctcataaccccagagggacattcaggtttgggcccaggcccaggctaacatggatagtcctagctgggcaccaccgacagtgcgtgttctgttttgaagagatggggtcttgctttgtcgcccagtctggccttgacctcctgggtaaaagccgtccaaccgtctcagcctcctgaggagaggggactgcaggcttgctcggtaatttttcttttttcttttctttttttctttttttttttgacggagtctcgctgtcgcccaggctggagtgcagtggcgtgatcacggctcactgcaagctccgcctcctgggtacacgccattctcctgcctcagcctcccgagtagctgggactacaagtgcccgccgccacgcccggctaattttttgtattttttttagagaccggttttcaccatgttagccagaatggtctcgatctcctgaccccgtgatccacccgcctcggccacccaaagtgctgggattacagacgtgagccaccgcgcccggctttgctccgtaatttttctgtgtgtttttgagactgagtctggctctgccgcccaggctggaatgcagtggcatcatctctgctcactgcaacctttgcctttggggttcaagcgattctcctgcctcagcctcccgagtagctgggatcacaggcgcccgccagcacacctggctaatttttgtgtttttttactagagacggggtttcaccatgttgtttaggctggtcttgaattctggcctcaggtgattcgcccacctcggcctcccaaagcgctgggatgacaggcgtgagccgctgctcatggccttcctcggtaattttaacgatcaggttaggatgggaatcaagggctggacttcagggcacctcggaggacagcggatgttggtgactgactttcttgctgcaggcttatttggagggttcctttgtgtcctagttcctgggggttttcacccgctaacttcacttagagattgaaacttctcccacttccagaagctgaatcgtagtgatcagcctgcggccccctgcagtggtacaggcctggttgagcagcctcaggccgcctccccatagtgcagacctgtgcctctgagttgctccagtcctggcggccccggagctcctgacccgcagtccgctctgccggcgttgccagtgccttggtctgccctctctgtggtggagcggggcccggggcagggtctccaggtgcaccgtggggagccctccatcaggcttttgtttctgtggattgtgttccaggtgtgggctctttcattttgatcccttctctccttcctggcctcactgctggcgggtgagagaggtttctccggagttgactgccccctttccccgggtgccccctgccctgcccctctgcctggtagcccctctgcaagcccggcccctcccgacgctcctggcttcctccgtgcccctttcctggcagcggggtcgccgagattcgcccgttgctttgtccttgctgctctccaggcaaacgggcggctcctcctcaccgactgcctcctctgtcccttgaggctatagccccatgccgcctcgttcccagagtctgccctgacccctcctccggcctgtccttggaagtcacagcagtacattatcccagaactgtctgtgagcaccagcgctcgccctgcactccacagagggggtgcctggaggagagcctcgtgccctgtgggtgtgaattcacgcgctgggacgcacgtccctggcacagggtcacaccaaagtggtgaatgattgttctcattctaataaccgagaggccacacgggcacctgacctgctctttcccctctcctcctccccagagtcactgggggtaggaactgtcaatgagccattttcaggggagggagtggcctcagcttaatccagccaaaggtcccctcgggaggaaacaggcagagctcctcaccgtgacacccacgttcctgtcactgctctgtggcaggaccctgggggactgacacaccctcagtcccctcggggtcagagtgagagtggttgagagcccggggtcgcttcagcccttggcttcccgagtttagcagccaaacccgttgacctggcactgtcttccctgagaggcaggtcccggtctcatctgtgctctgttcactggggcccccgaggttagctaccaaggcgcttcctgaaatgtgacgctgatgcccgtcagcccagttcgtgcctaaccacaggcccaagcagacccaccccaacaccaaagtgtcgctgcctctgtctaaatgcaacgagtgctccccacggcacttccccctgcgtcagtcacctccaaaaattacacctgagctgagaacagacgctgggctctagttagtgacgtgtttgctgcagttgactctgaaggcttaaaaaagtgagacgggctgcgggaggaagagagacgggaacaacgcaccaacccaggagcatcgggggtccctgcctactttacacgtctttctgtgttagaataatttttttttttttgagacggactcttgctgtctcccccgctggagtgcattgcttcgatctctgctcactgcaagctctgcctcccaggttcacgccattctcctgcctcagcctcctgagtagctaggactacaagtgcccgccgccacgcccggctaattttttgtatttttagtagagacggggtttcactgtgttaaccaggatggtcttgatctcctgacctcatgatccacccgcctcagcctcccaaagtgctgggattacaggcgtgagccaccacgccctgctagaataatttttttttagagacggagttgcgctctgttgccccggctggagtgcggtggtgcgatctcggctcgctgcaagctctgcctcccaggttccagcaattctccagccttggcctccccagtagctgagatcacaggcgtgcaccaccacacccagcttttttttgtgtttttagtggagacaggatttcgccatgttggccaggttggagattttatttttcttaagtctcactctgtccagctggagtgcagcagtgtgatctgggtgactgtagcctctgcctccggggttcaagccatcctcccacctgagcctcagagttgctgggattacaggcgtgaaccaccgcttcccactaggtttttgtatttttagtagaggttgggtttcaccatgttggccaggctttggtatccgtgtatcctacacctgctctccgtgccacatgcgcccgcaggttacgccaaggaggccctgaatctggcgcagatgcaggagcagacgctgcagttggagcaacagtccaagctcaaagtgagtggggccggtgtgggcgaggaggccggggcgcacatggggttcaggcgtggagattggtggggctgctactggtgggtagggccaggggcgtgtacatgggcagcagtggggccagggccgagcttgggcgcctcatttcacagagggaaacaaggggaggtgagagacgctgccgcagagccgcccgagagggagggtcagtgttggtgagggcgtctggtcgtcctgagggagggccggtgttggtgagggcatctggtcgtcctgagggagggggtcttcttcacattctcacctcatttcttttcactcagcaggattttttattttattttattttattttattttattttattttatttattttgaaacggagtctcactcttgcctaggctggagtgcaatggcgcaatctcggctcactgcaacctccgcctcccgggttcaagcgattcatctgcctcagcctctggagtagctgggattacaggcacgcgccaccacgcctggctaatgttgtattttagtagagacggggtttctccatgttggtcaggctggtctctaactcccgacctcaggtgatccacccgcctcggcctctcaaactgctgggattacaggcacgcgccaccacgcctggcctattttattttattttgagacagagtgtcactctgtcccccagtctggcgtgcaatggtttgatctcggctcactgcaacctccacctcccgggttcaacctcctgcctcagccttccgagcagctgggactacaggagcctgccaccacatctggcgaatttttgtatttttagtagagaagggggttcagcatgttgtccaggttggtcttgaactcctgacctcaggtgatccagccactttggcctcacaaagtgctgggattataggcaagagcgatggcgcccggcccactcagcaggattcctagaatgggcacgagctctgccctcatcacagtccaaaagtgagcacctgcctggagctgcccagaaacagccttgtggggtggggttggtgtctgacctccctccccgggggccttcgcaggcttctctgctggtgcttctgtgcctgtgggtctggattcctccagggcctgatcctgggtgcagatgcagctggaagccctgaacctgctgcacacactagtctgggcacggagtctctgccgtgccggagctgtgcagacacaggagcggctgtcaggcagtgccagccctgagcaagtgccagctggtgagtgctgtgctctgcaggagtatgaggccgccgtggagcagctcaagagcgagcagatccgggcgcaggctgaggagaggaggaagaccctgagcgaggagacccggcagcaccaggccgtaagagcgcaagaggccgcgagggaggccgcccggctgcggggagcggcctggggcaggactgggagctgggtgtggtcccggggcactctggagtcagccattagagctgccctcggaacggccttgcacaaacgcctaagacctgtaaggtccctcactgctgagccggacgggaggtccccgcgcctccccacgtttgtgtgaggctgatggcgcgtcggagtccccggcgctccgcccagtcggcccagactgcagctcccggctgagatgtgtctttgccgccctcttctcccccagagggcccagtatcaagacaagctggcccggcagcgctacgaggaccaactgaagcagcaggtgagctcagcctcccctgcgaggcgcctgcgtccctgagaacgtaggtggctttgtgggaccagtcagtgggtcagaggccacggggcaagaacgatggggttgctgacggtgggtgctagagcaggggaaactactcggacagacacgcaccagcacacgtgtacaggcacacatgcagatgtgtgcacacatgtacacggagacacaggcacctgcccacacagacacacactcctcgcacacacactcccggcagacaggcacacacacccctgcacacatgggcacacacacacccctgcacacacgggcccacacactcccctgcacacatggggaaacatgggcccacacacacacacccctgtgcgcacacacccctacacaggggcatggacagacacccgcaaacacacccccacacaacacgggcacgcacacacacaccccgccacaacacaggcacacatacccctgcacacaggcctgcacatacacccccacacaggggcatgctcacacagcccgcacacacacaggtatgcagacacacccaaacacacatgggtcctcaggcacacactcccgcatggggcatgcacgcacctcccacacacacccgatcacacataggcatgcacacccctctgcacacatgggggcttacacacccccccgcacacgtgggcccgctcacacagcccacacacataccccttcacacaggcacacaccgccccgcacacacgggcctgcacacacacccccacacgggcatgcacacgcccacacacacgggcgcgcacacacccggacatgcacaaacacccacctgcacacacgggcacaccccaccacacacacacacaggcatggacacacgcacaccccctcacacataggcacacatacacaacccaggcacacacccccttgcacagacgggcacgcacacagtcccacacatgggcacacgcgcacaccgccgcaaacacacacacgggcacgtgtacgcacccccactcacagtgtgcctcatacatacgggcacgcacctgcacacgagggcacacccccaccccccacccccacacacccccgcacccatgggcacacacacattactgcacgtgagggcatgcacacacacgccctgcacacccccacacacagaccccttgtgtgggttccacagcagcggctctccaggcacgacaagcctccttgtctcccacccgggcgcccagctggcagtctgggaggttctgcttgggagggctggtcagtggcggcgggcgggtctctgggtctatgagaaaagcttgggtgacatctgttccctggtccttagggaccgtcaccttcagtcctgagctcgcaggcggggttcacatgttgcctgttgtgggcattgtagctttaacgtttaattggcggaagacagaagcttccttaagcccagcctgaatcagggcagtggtgttgggaggtcggcccgcggtggcccttgtcagggaagccacagtgggggctgtttctgccactggggagtttgggaccctgaacccatcccctcagtgactgccgtcccagccgatgtcacccgtgtctgtgtcagggtgcggcgtctgcaggtccccaggtgcccaggacgcttggagttctgtggtcctggggcggacgcaacctctggattggtgttgagcatttttctggttttaaaggcttttctctttttctgcggcttcttctcagcaacttctcaatgaggagaatttacggaagcaggaggagtccgtgcagaagcaggaagccatgcggcgaggtaggctgtctgctctcctggctggggcggaggtggcgggggctgcttgtggatccggcgtgcactctgagcctgagttctgccgcccggcccctcatagctaccagtgcagtgggcgaggcctgctggggctctgcggggtggggctccctctcggaagacacctctgtctgcgagtggacgccaggatctgttcagggagggcaggagctgcttcacttcatgggaagtacaggggccttttttttttttttgagacggagtctcgctctgtcacccaggcaggagtgcaatagcacgatctcagctcactgcaacctctgcctcccaggtttaagcaattctcctgcctcagcctcccgagtagctgggattataggctcccgccaccacgcccagctaatttttttgtatcttcagtagagaaagggtttcactgtgttggccaggctggtcttgaacttcttgatctcattatccgcctgccttggccttccacagtgctgggattacaggcgtgagcctctgcgttctgcctagaacatgggtctttactgtcctggtttcagtggggatcacaggtatttggtgccatgtggcatttgttggcgagtgctccaggcaaacgtctgtcaccactcttcaccgtgggtgggcttgtggcgaggtgtgtgcgtttaatgttcagtagccaggcacgtggcacgtcacgcgtgtctgagttctgacagctgtgtttctgtgtgaggggggcttccttcagaactccgcgttctggttttttgcttcaaagagctcgtcctgagaagttgcctaggcctctgggtcggatttctgccctaatccatgggcagggccggcctgtggcgctgtccctaccaaggtctgtgtgtgtctgtggcacgggcctgtccatggactgggcttgtccgtggagtgggtcggtccatggccttagcctgttggtggcgtgggccggtccacggcatgggcctgtctgtggcgtgggccggtccgtggtgcgggcctgtccgtggccttagcctgttggtggcgtgggccggtccgtggcatgggcctgtctgtggcgttggtctgtccgtggcgtgggccggtccgtggcgtgggccggtccacagtgtgggtggaggtggacgtgctgcactgcatggtgctgagctgccctgcctctctggggcagccaccgtggagcgggagatggagctgcggcacaagaatgagatgctgcgagtggagaccgaggcccgggcgcgcgccaaggccgagcgggagaatgcagacatcatccgcgagcagatccgcctgaaggcgtccgagcaccgtcagaccgtcttggagtccatcaggtgagcactgcccaggcccgggccggccacagatggagccccgcaggtgtgagtcgctggtcccagggcgctctccagctcttccaggcctggccgccataggctgactccttggtgggggcactgcccctctgtcctggcaaggccgtgccgccatgtcagggcctcaccctcaacctgctctcgctgcgtggtacggatcttcgtgtccttcctggtcacaccactgctttccccgcaggacggctggcaccttgtttggggaaggattccgtgcctttgtgacagaccgggacaaagtgacagccacggtaaacatattcataaaacagggctggcaggtggctgagaggcagcatgtgggggcctcctggagccccaggtcctgtccctgccggctctgcacagccctgtagctctcccagcacagagcaaacccacgttgtacctgctgggctcggctgctcctccctccttgagctgggagaaaaaaatgcagttgccagcctgggccacacggtgagaccccatctctacgaagaataaaacattagctgggtgtgatggtggcgcctgtggtcctgctactcgagaggctgaggtaggaggatcacttaagcccaggaggtttgggctgcagtgagccaacattgcaccactgcactccattcttggcgagagaataagaccttgtctcaagaaaaaaatggccaggcggtagtggctcaggcctgtaatcccagcattttcggaggcggaggtgggcggatcacgaggtccggagatcgagatcatcctggtaagagtgaaaccctgtctctactaaaaaaaagaaaaaaaaagaaaagaattagctgggtgtggtgacatgtgcctgtaatctcgggaggctgaggcaggagaatcacttgaacccgggtggtggaggttgcaatgagtcgagatcccgccactgcaccccaagaccagcatgaccaacatggtgaaaccccatctctgctaaaaatacaaaaattagcaggccaaggtggcgtgcgcctggaatcccagctgcttgggaggctgaggtaggaaaattggttgaacccaggaggcggaagttgcagtgagctgaaaccgcacaattgcactccaacctgtggaagaagagcgaaactctgtctcaaaaaaacaaacaaaataaataagccaggcctggtggctcactggtgtaatcccagcactttgggaggccaagacgggtggatcacttgaggtcagaagttcatgaccagcctggccaacatggtgaaaacccatctctactaaaaatacaaaaattggccgggcctcgtggcacaggtctgtattagctgagtgtggtgacctgagcctgtaatcccagtcactcgggaggctgaggcaggagaactgcttgaacctggaaggcggaggttgcagtgagccaagatggcaccattgcactccagcctggccacagaacaaaaccctttctctaaaaacaaagtcaagggcgcattaagcagctccttcatgtcctcaggtgacaccgtctcaccaacatggcaacaccacctgcaacattcaccgtcacgctgaccaggccaccggcaggtgctgcagtcacagcagtgggcgccggcaccacggcagagcaagtgcccactcagtgccgggcacctactgtgtgctgggcggggtggggggacggaggacacagccatgtgcgacctggggcgccaccacagcaggccagagcctgggcacaaaagagcgaggctttaaacgagagaagaatctgaacttcaaactctcagggttttattccgaataacgaaagtttttgcgaaatggagtcgggttcgctttctgggtctttgatttttttttttttgagacagagtctcactttcaagtgtgctgctcaagtgcagtggcgcgatctcgactcactgtcagcttcgcctcttgggttcacaccattctcctgtctcagcctccggagtagctgggactacaggtgtctgtcgccacgcccggctaatttttttgtatttttagtagagagagggtttcatcctgttagccaagatggtttcgatctcctgacctcgtgatccgcccgcgtgggcctcccaaagtgctgggattacgggcgtgagccaccgtgctcagccacagccagctaattttttcatgtttttagtagagacgaggtttttccaggttggttaggctggtcttgaactccaacctctggtgatacgccggccttggcctcccaaagtgctgggattacagacctggccagcctaaacgatttttaaaacaagttagagattttgggttagtcttgttttccaggaataaagtaccatttttagtggccaaggatgtaccagagggtgtggccctgtgacatccagctgggtctgcccagggccccgctcagcgaccgaggctttctaggatttatgctgccagttgcagagaaaatggccctgagtgagggcgttatgactgccccacctgcctcctgtaaccgcgtggctgtgggattcggggctgggaattcgggttcctgtggggccagcacacggccctgtgcttctccctcaggcggagagagggtgggggcagccccgtgcgtctcctgctctaggagggagggacggtgggggccggtgcgccagtgcggtgtctctgctgcaggtggctgggctgacgctgctggctgtcggggtctactcagccaagaatgcgacagccgtcactggccgcttcatcgaggctcggctggggaagccgtccctagtgagggagacgtcccgcatcacggtgctggaggcgctgcggcaccccatccaggtagcggcgcaggcctggccctccctgagtgcagttcctggctgagtcccttctgccccacgagcacagcccacgcacaccctcccgtcccttccctttccccggataacaggcacccgcacgctgcttcacgggtgggttttcctgtctggcgctgtaccttaggggtctgcatcagtgagacccttcccctgtctgcctcggtgtcccttgctcagggctcttgatggggcctgggagcacatcggggtccttgcaagacccgggacttgggtgtgcggccgtctgtcggggaagctgctacaggccatggcgtctggtggcctccctggggagccgcgccgcttgccagcccctgaggtgcctgctctccacaggtcactgggtaggtggttaagaaaataaaagccaataaggaaccggaaaatgcccctaatcccagcaatagcctcctggtctcccggcggggcagggttccagctccgggccggtcctggctgtgctttggggcagctccgtttctgtgtgttaccgagcatgtgtgtgcgttggtggctgttccgtggctgtggcaggtgacccaatggtgcttccccttcccctccggcaggtcagccggcggctcctcagtcgaccccaggacgtgctggagggtgttgtgcttagtgtaagtcggtgtgcctgggaccggggaggtgcagggaggggaccccggagctgggctgggctgtggcccttgctagcgctcgtggtggcgcccaggagcttttgggtcctgagatgcaactgcttggactgtgccggggatagataggctgcccacgagctgggcggcttcctgaggagcagagtccgcacccgggcattcccgcagcccctgtcaccgaggcttccgtgggtgcagagtgtctcccccaaacccccgtcttccccggcagcccagcctggaagcacgggtgcgcgacatcgccatagcaaccaggaacaccaagaagaaccggggcctgtacaggcacatcctgctgtatgggccaccaggcaccgggaagacgctgtttgccaaggtgagagcgcctggctgaacaggtgggccaggggccgctggggtctcacctgcctgcaggtgtctgggggcctcagccgcctggggaatggaccccccttaggcctttgcctaccctcgtgtaggctcagggtgctggtgtgggcagcagcgcctcccatcttccaggcgggggacgtctcctgtctggcaggctgtggcttccagacagggacacccggcaggggctccacactccaggtggagtgtgcaggctttgcagaggcagagggaacatctgttctgtctcccctcactcttcttgtccagaaactcgccctgcactcaggcatggactacgccatcatgacaggcggggacgtggcccccatggggcgggaaggcgtgaccgccatgcacaagctctttgactgggccaataccagccggcgcgggtgagacgtccccacagcatgcaccaggcccttggctgcggcccagcaggctgccttctgggaagggggtccaggtgtctcttggggaccctgtctttctgcagctctgtccttgtggccacgcaggaggcccaatggagggtccctcggagggaaagtcccctgagtgtggaccctggtggacacgaggtccccagcgtgtggaggctgccagtgggatacttggctcagggcagaagggaggtgggtgggtgcagggggagaggggtcttcacagctgcaggggaggctcctccacagccgccctccccccaacacgcctgcaggtgggcgtgggcactggttgccttttctagaaccatttgaaagttagctgaagacagcatggcacactcccttcaataggtcccacagtgaccccgcgcagggcacagcccgggcacccttgtggcctcggctgtcctcgttggaaccacgatcctcatggttggcaccctcccctctggcctttgacctttcactttagaagacctgtccctgcgccaggcgtggtggctcacggctgtaatcccagactttcggaggcggaggcaggcagatacgaggccaggagattgagaccatcctggctaacttggtgaaaccccgtctctactaaaaatacaaaaaattagccaggcatggtggtgggcacctgtagtcccagctactcaggaggctgaggcaggagaatggcgtgaacccgggaggcagagcctgcagtgagccgagattgcgccactgcactccagcctgggagacagagcgagactctgtctcaaaaaaaaaaaaaaagaccctgctccttgcgtggactcttgagcactgcactgggtcgctgtgtgggtgaaacctgcagggcggaggctgttgccccatgtgtggttggctggtgtgtgggtgaaacctgcagggcagagtctgttgccccctgtgtagttggtttcccactgccttctgaggctgagacgtggtcagctgcccagaggccaggctgatcggcttctgtcgagtccaggacttagggctcctgatggggcagagcctgaccccgtggggatctgcctgcctggcctgctcctgccgcggccggacgctgctgtgggctgctcctggcgtcactctcgccttgcttggcctctctctcgttcacagcctcctgctcttcatggatgaagcagacgccttccttcggaagcgagccactgtgagtgtcactaagcctctgtctggccacaggagggtggtcgggtgggcgcggctgtcatcctgggccaggctgcagcccttaagctggcttgcagtggcgcaatcttggctcgctgcaacctctgcctcctgggttcaagctgctctcctgcctcagccccctgagtagctgggattacaggtgtttgccaccacacctagttaagttttttgtatttttagtagagatggggtttcaccatgttggtcaagttggtcaagaactcctgatctcaaatgatctgcccacctggcctcccaaaatgctgggattacatgcgtgatccaccacgcccagccatacagttattattttaatacagggtgtctgtcgcccaggctggagtgcaggggcgacatctccagctcaagcagtcctcctgcctcagcctcccgagaagctgggattgcagaggcacactaacacgcccggctaatttttttgtaacgttagtagagatggagtttcccacattgtccaggcagggctcaaacttctgaactaaagaaattcaccggccttggcctggcacagtggctcacgtgtgtaatcccagcactttgggaggccaaggcaggtggatgacgaggtcaggagttcaagaccagcttggtcaatatggtgaaaccccgtctatagtaaaaatacaaaaattagccgggcgtcgtggggcacgcatgtaatcccagctgctcaggatgctgatgcaggagaatcgcttgaacccaggaggcagaggttgcagtgagctgagatcgtgccactgcactccagactgagagacagaacaagacttcgtctcaaaaaaaaaagcgagagatttgatcgccttgaccttctgaagtgctaggattaaagatgtgagccctcagtcaggctttttttttaaatgtattttttattttttagcaattctcatgcctcagcctcccaagtggcttgagattacaggtgtgccaccatgcatggctaatttttgtatttctagtacagatggggtctcaccatgttggccaggctggtctcaaactccctacctcaggtgatccgcctgcctcagcctcccaaaatgctgggttacatgcttgagccaccgcccctggccctggtcaggattttgagtttagatccatgaaagtgtcgccacgtccctgctccctgcaggagggaggcctgtgggactttctgctctggctgtttacaaggctttgcttctggtgcctaaggctggaaccttctctctgcaggaggagataagcaaggacctcagagccacactgaacgccttcctgtaccacatgggccaacacagcaacaagtgagggagcccctcgggtcctgagcccccgggcagggctgtgcagccgtcgcccttggttcccactgagggtccctggctcacagtgctgggcaccagctgtggcctcagtgtgcccacctcagatgtcccctgggaacggcccagctcgggacagcacggggtgtcattgaggaacatgcaggggcctcccgggcagagctggggtcagtcctgtcttcacggccctgtgcgccgccgccccagcttgcaggtccctctgcccctagatttctgcggtcctgtgcctgcaagggaggtggtctgattgctgccgcccagaggtccccagtagggtgaccggccctatgtccaggctccctcttccctcccaaatcccttaattttgagttttcttggtctcctgggcccctccagccccagtcacgtgtcacacggaggatcaagtcctgctggtcggccgtggctgactcttcaggcacgttgggctcctgggtcagctgctgccgttcgacgctccctggagccctgactcaggtccttcccagagaggcaaggctggggccctgctgagcctctgctgaacccgggcccccgaggtcctgcttctggctcgcatggccataatcttgacagggactctgggtcccgcatccctgctcccagcacagcggggctcaggtagcaggagggagtggtgttcccggcactgcctatcaggctgggcgagggtcagcggggaagtaccacacagggcaagaacagaggcccgagaagccgggcggggggcagctgggcgtggtggggcaggcaggcgggtgaccagggctgtggctgcgttctccccatgtttcctgtgctcacaagctgccgctttagattctcccaaaaagtctccccgagggggctgaggagcccccgttgccctcggggcatctcagctggcagccccagcgtttccttccccatccctgtcctacagattcatgctggtcctggccagcaatctgcctgagcagttcgactgtgccatcaacagccgcattgacgtgatggtccacttcgacctgccgcagcaggaggagcgggagcgcctggtgagactgcattttgacaactgtgttcttaagccggccacagaaggaaaacggtgagtgtcccgcctcacccggcccccaatccaggcaccatatggcatgggtgtaggccagctgcctgtcttccggcctccacctcatggtgtggggtccgcggccttggctgcctcacttgggaactccttccccaggcgcctgaagctggcccagtttgactacgggaggaagtgctcggaggtcgctcggctgacggagggcatgtcgggccgggagatcgctcagctggccgtgtcctggcaggtgagtcaggctccggcacgtccacccagacgggaccccagctgctgtggagatgctcagttgcgccaggcctgtcccagcaccggtgtcatgtgggagcttctgttgaggggttttcagtgcacagacgtgacacagggccccctgcctcagtcgggccactccacgcagcagcgtgcacctgctcgtgccctcaggagggtggggccatgttggttgctgacagtcacacggggctctctggaagccagtccagcatcccaggtgcccgggctctgctgggtgtggtgggaggtttctggctctcatcttggccaacaggcacctcctagagggaatggtcgtcaggacaggccccgtgtgagttgggtggtgggggtggagggacgttgtgtttcctggaccaggtcccttggcttggtcctgtttgacgggttcagacacacggtgggactggcctccgattgtcccacagttagttgttcctcggaggcacccctcctgctgctccttggatactccagggccgaggagccgagactcactggagtgtgggcatggccatccagagagctctgatcaggccgggcgcggtggctcacgcctgcaatcccagcactttgggaggctgaggcaggcatatcacggggtcagattgagaccatcctggccaatatgtcgaaaccccgtctctactaaaaatacaaaaattagctgagtttggtggtgcatgcctgttatcccagccacacgggaggctgaggcagaagaattgcttgacccggggagttggaggttgcaatgagccaagatcgcaccaccgcactccagcctggccaaagattgagactccatctcaaaataaaagaaagctttggtctttgggggttgctgaaaaagcaaaaccaggtctgtggggtagaaggcgccctggccacacacaggcattgccgcctctggggtccgcagagtctgtgtgacaacctggtcactcgatctagcagcgtatttgaatgaatgagtgacagcttaatgaagtagccaagtaccttgatttgaacgtaggagccggggtatgtagggagctgtattagtcagtacaggctgggttatgccgctgtgacaaagagtcccagatctcaaaccccgtccttgtgggtcagctgaggtctctgttccaggccgtccccacttggaaccaggtctgtttccacaactcagaaagtggaggctgggtatggtggtggctgacgcttgtattcccagcatttggggaggccaagtcagtcagattatttgaagccaggggttcaggaccagcctggaaagcaaggtgagaccccatctctacaaaaaatgaaaaaattggccggacctagtggcacatgcctgtaatgccagctgcttgggaggctgaggtgggagggtcacttgagtccaggaggcggaggctgcagtgagctgtgattgtgccactgcactccagcctgggttacagagcaagaccctgtcttaaaaactgagaataatttggaacaagcccggtggctcactcctgtaatcccagcatgttgggaggccaaggagagaagatcacttgaggtcaggagttcaagaccaccctggccaacatgatgaaccccacctctacaaaaaatacgaaaattagctgggtgtggtggtgggtgcctgtaatcccagctactcaggaggctgaggcaggagaattgcttgaacccacgaggcagaggatgcggtgagctgagatcatgccactgcactgtagcctgagggacagagtgagactgtctcaaaaataataataagaagaataataatttgggctgggcacagtggcacatgcctgtaatcccagcactttgggaggccgaggtgttggatcacttgaggtcaggagttcgaggccagcctggccagtgtgccgagaccccacctctactaaaaatacaaaaattaactggacggggccgggtgtggtgacttatgcctctaatcccagcactttgggaggccgaggtgggcggatcacggggtcaggagttcaagaccagcctggacaacatggtgaaaccccatctctactaaaaaataaaaaaattatccaggcgtggtggctggcgcctgtagtcccagctactcaggaggctgaggcaggaggatcgcttgaacccgggaggtggaggttgcagtgagctgagatggtgccactgcactccatcctgggtgtcagagcgatactccatctccaaaaaaaaaaaaaagaaagaaattaacctggtgtggtagcaggcacctgtaatcccagctgctcgggaggctgagtcaggagaattgctggaactcaggaggcagaggttgcagtgagctaagatcacgccacagcactccagtctgggcgacagagcgaaactgtctcaaaatataaatgataacagtaataatttggcttggcacggtggctcttacatgtagcattttctacacataagattatgtcacctgagaacaggtgattttacctctcccttttcagtttggatgacttttctttttcttgtcccatatctctggccagagcttccagcgatatgtggaatagaagtggtcagaattcttgcttggttctttctcagaggaagctttcagtttttcaccactgagtatgttagctgtggacttgtgatcgctggccttctttgtgtttagggcatgttcttcaatcctggtttgttaattttttttgtttcttttcttttcttttggtggggggaccagtctcgcttttgccgcccaggctggagtgcagtagagacagggtttcaccatgttggccaggctggtctcgaactcctgacgtcaggtgacctgcccacctcagcctcccaaagtgctgggattacaggtgtgagccactgcaaccgaccagttgaattttttttttttaatcataaaagtgtgttgaattttgtcaaatgcttttcctgcatgagatgagagggtcatgtggtttccttcctccactctgctaatattgattgattttcatatattgaactatccttgcattccaggaatgaatcctgcttggttagggtgtagagtcctttaactatactgctaaattcgttttgctggcattttgttgaggactttcccagtgaggctcatcagggatattggcctgccatttctcttgtggtgtgtttgtctggctttaatatgagggtaatgctggcttcctaggatgagtgaggaaatgttcttcaatttgtccaagagtttgaggagtggtactgattcttcttaatgttttgtgaattcacatgtgaagaaatcaggtccaggtcttctctttgaccttttatagcttgaagatcttaggttcccagaaaaattgcaagggtagcacagagagctcccgggcccggggccttcccacatggtgaacatcatgtgtcactgttggacccacccgcgaccaggttttgccccagaatcccacccaggaggccacgtgacatttagctgtcacttctggtgggctcctgccaggtcccgtgcttcctggaggggtggccctgtgagcatctgcgtagcccctctcctctgctgggccctgggtgacgtgcagccactcgggtggaccctgagggtccctgcacctgtttgccctctcttgggtgggctcaagaccaaaaatgatgttgagcagtcctgggcccctgagccacagtggcggtgcggctccggtcagtgtctcctgcgctcccgggcccccgacccacagtggcggtccggctctggtcagtgtctcctgcgctcccgggcccccgacccacagtggcggtccggctccggtcggtgtctccccacacagtggctcttggcgaggggtgggcgctggcagaggggacgggcaccacgtggtcatccccatgacaggttctgtcatggtgacagtgttgtgggaggatggtgtgctgctgcccctgcaccccgtgagatgaatcctgcctctgggaggtacagctgggacggggcgagggacccactcagctgtccaggaagggtcccctgccctgtgcttcctccaggtgtcctggtgcactcctgagcacggcacctagtgggggtccccacaccctcaccctgacccatgggtgcctccccttggggactccacgcccttcgctggcactgagatggagagcgacctgtccgtggcagaagggctgctgcacctgaggtgcctaaggcgacaccaagggccacagccccagtagctccagcctccgtgtgctcaatgccaagccctgtgcccaggaggacagggaaatggaggcagaggtggccttgatgtcccaaggtgggcagtggctgcctctgccctggaggcctgtgagggtcagggtctgagggtctgaggtgcactatgacccgggggcactgcctggccacggctgagactcgcagagggtctgcagttcccacctgcctctcggaagctgccctgggtcagccgtcagtggtgctccgccttgggttttctattatcagaaagtcattgagcaacagcagtgctgaggacgcaggcagggctgtgggcactgcaggggccgctcccagtgtccacacgcgtgctgggctctgccaaggtgtgggaagcctgtgtttcaccctgaggttgtcctggtgcccctggtttggcccctccccacctcggggccctggcgtgcattaagggtggcgggttcccatagcggcctccctcagctccctctctcttcactaggccacggcatatgcctccaaggacggggtcctcactgaggccatgatggacgcctgtgtgcaagatgctgtccagcagtaccgacagaagatgcgctggctgaaggcggaggggcctgggcgcggggtcgagcaccccctatccggagtccaaggcgagaccctcacctcatggagcctggccacggacccctcctacccctgccttgccggcccctgcacatttaggatatgctcctggatggggactgggctgtgcccagggcctctgtcccccaggatgtcttgtggtggcggtcggccgttctgccccccagggcaccccctgttgtaggcactggctagggaggggcaggcctccttcctgcccctcgagacactcttgggagatgcattttccgtctggctcacagggggagggtgaggctttgtaccccagcccctgcccaggccactgtgagggtgggtgctggctgagcccctggggcagaaggagtggggcaggcggggtctttgttctcggctcccacagcagagccaggtgagggggggcctgccaggactagacagaagtggggcggcctgaaccctgcttccagccatggccaggggccacggaacccggcaggggtgtctgaggccgccctgtcagctggccggtccaagcctgtggctggagctggtgtgtgtttatctaataaagtcccacaggtgcctcacc

SEQ ID NO: 1682 - DNA, 24533 bp, Homo sapiens
ccggctgcggcgcgtggagctgctcccagccgcgctcgagtcagactcgggtgggggtcccggcggcggtagcggcggcggcggtgcgagcatgtcgtggctcttcggcgttaacaagggccccaagggtgaaggcgcggggccgccgccgcctttgccgcccgcgcagcccgggccgagggcggggggaccgcggcttgggagaccgccggcgcccaaggacaaatggagcaacttcgacccccacacaaaaaataggaccaaggcggcgcgcgagctggagcactcgcgtgagtgcggcggggcggggcgggcgggcgggcgggacgggccggggaagcgggagccctggccttgccgctcctcgctgctgtcggcagccacttcccgggcgagactgcgcccccggagcaccccccgccggagccgtctcgcgtgccgggaggatcggactctttccgtcacccgtttgcacctctgcagctgtcaggagcgggtcaggtgcgaaaagcggtgcggaggtggcgctcataggttacaggggtcagggtctggggctggccgtggtcttcagttaccgccgagcgtgcgggatccttctgcgcttgccgcctccacgtggcacaggccaaggcgtggccagatgggtagatgggtttgttgggtggttgctagcagtttccacgtaacaagggaagcgtatttgagagttacttgattctaacgagactagcagatttgcacttcttgttggaagacgttagcatttgcacggcgaggtctgtgaagcacaggccaggccgtgctgctcagcttgagtaaacccctgacccaaggccctcagggtgtgagcactgactgcaccttccctaagctcgggtctcttcccccagccttcctttcccctgtggctttaacgatttgtagcacgatgcagttcaaatggctaggagtctggaacgtagaaggtgctgaattcattgaaagaatacagtggttctcaactcttgtttaagccggggttctttctatttatttatatattgagacacagtatcgccctgtcgccgaggctggagtgcagtggtgcgatttcggctccctgcaacctccgcctccgattctcctgccgcagcctctcgagtagctgggattacagccgcgcagcaccacgcccggctaattttttttgtatctttagtagagacgggtttcaccatgttggccagggtgctctccaactcctgacctcgtgatccgcccgccttgtcctcctgaagtgctgggattacaggcctgagccacagcgcccagacagaagggattccttttttttttttttttttttttttttgagatgagtctcgctctgtcgcccaggctggagtgcagtgacgtgatctccactcactgcaagctccgcctcccgtgttcacaccattctcctgcctcagcctcccgaatagctgggagtacaggcgcccgccaccacgcccggctaattttgtagagatggggtttcaccgtgttagccaggatggtctcgatctcctgacctcgtgattaattttttgtatttttagtagagacggggtttcactgtattagccagggtggtctcgatctcctgacctcgtggtccacccgcctcggcctcccaaagtgctgggattacaggcgtgagccaccgcatgccacctttttttttttaagatgatgtcttgctctttggccaggctggagtgcaatggcgccatcttgtctcactgcaaaccgcaacgccctggttcaaagaattctgctgcctcagcctcccaagtagctgggattacaggcacgcgccaccacgcccagctaatttttgtatttttagtagagacgtggtttcaccaccttggccagggtggtcttgaccacctgaccccgtgatccacccgcctcgacctcccaaagtgatgagattacagtcctgagccaccgcaccttgccagcaggggttcctttttagaaagaagatcatttagggaatccctggtgtgaagcagatataaacagagtttccctgtttaaggagggatggcctggtggtacttgtggttccatcctgtgcccttccccggggtgctggggaacatcctgagctgaggtttctggccccggctgggtctcataaccccagagggacattcaggtttgggcccaggcccaggctaacatggatagtcctagctgggcaccaccgacagtgcgtgttctgttttgaagagatggggtcttgctttgtcgcccagtctggccttgacctcctgggtaaaagccgtccaaccgtctcagcctcctgaggagaggggactgcaggcttgctcggtaatttttcttttttcttttctttttttcttttttttttgacggagtctcgctgtcgcccaggctggagtgcagtggcgtgatcacggctcactgcaagctccacctcctgggtacacgccattctcctgcctcagcctcccgagtagctgggactacaagtgcccgccgccacgcccagctaattttttgtattttttttagagaccggttttcaccatgttagccagaatggtctcgatctcctgaccccgtgatccacccgcctcggccacccaaagtgctgggattacagacgtgagccaccgcgcccggctttgctccgtaatttttctgtgtgtttttgagactgagtctggctctgccgcccaggctggaatgcagtggcatcatctctgctcactgcaacctttgcctttggggttcaagcgattctcctgcctcagcctcccgagtagctgggatcacaggcgcccgccagcacacctggctaatttttgtgtttttttactagagacggggtttcaccatgttgtttaggctggtcttgaattctggcctcaggtgattcgcccacctcggcctcccaaagcgctgggatgacaggcgtgagccgctgctcatggccttcctcggtaattttaacgatcaggttaggatgggaatcaagggctggacttcagggcacctcggaggacagcggatgttggtgactgactttcttgctgcaggcttatttggagggttcctttgtgtcctagttcctgggggttttcacccgctaacttcacttagagattgaaacttctcccacttccagaagctgaatcgtagtgatcagcctgcggccccctgcagtggtacaggcctggttgagcagcctcaggccgcctccccatagtgcagacctgtgcctctgagttgctccagtcctggcggccccggagctcctgacccgcagtccgctctgccggcgttgccagtgccttggtctgccctctctgtggtggagcggggcccggggcagggtctccaggtgcaccgtggggagccctccatcaggcttttgtttcctgtggattgtgttccaggtgtgggctctttcattttgatcccttctctccttcctggcctcactgctggcgggtgagagaggtttctccggagttgactgccccctttccccgggtgccccctgccctgcccctctgcctggtagcccctctgcaagcccggcccctcccgacgctcctggcttcctccgtgcccctttcctggcagcggggtcgccgagattcgcccgttgctttgtccttgctgctctccaggcaaacgggcggctcctcctcaccgactgcctcctctgtcccttgaggctatagccccatgccgcctcgttcccagagtctgccctgacccctcctccggcctgtccttggaagtcacagcagtacattatcccagaactgtctgtgagcaccagcgctcgccctgcactccacagagggggtgcctggaggagagcctcgtgccctgtgggtgtgaattcacgcgctgggacgcacgtccctggcacagggtcacaccaaagtggtgaatgattgttctcattctaataaccgagaggccacacgggcacctgacctgctctttcccctctcctcctccccagagtcactgggggtgggaactgtcaatgagccattttcaggggagggagtggcctcagcttaatccagccaaaggtcccctcgggaggaaacaggcagagctcctcaccgtgacacccacgttcctgtcactgctctgtggcaggaccctgggggactgacacaccctcagtcccctcggggtcagagtgagagtggttgagagcccggggtcgcttcagcccttggcttcccgagcttagcagccaaacccgttgacctggcactgtcttccctgagaggcaggtcccggtctcatctgtgctctgttcactggggcccccgaggttagctaccaaggcgcttcctgaaatgtgacgctgatgcccgtcagcccagttcgtgcctaaccacaggcccaagcagacccaccccaacaccaaagcgtcgctgcctctgtctaaatgcaacgagtgctccccacggcacttccccctgcgtcagtcacctccaaaaattacacctgagctgagaacagacgctgggctctagttagtgacgtgtttgctgcagttgactctgaaggcttaaaaaagtgagacgggctgcgggaggaagagagacgggaacaacgcaccaacccaggagcatcgggggtccctgcctactttacacgtctttctgtgttagaataatttttttttttttgagacggactcttgctgtctcccccgctggagtgcattgcttcgatctctgctcactgcaagctctgcctcccaggttcacgccattctcctgcctcagcctcctgagtagctaggactacaagtgcccgccgccacgcccggctaattttttgtatttttagtagagacggggtttcactgtgttaaccaggatggtcttgatctcctgacctcatgatccacccgcctcagcctcccaaagtgctgggattacaggcgtgagccaccacgccctgctagaataatttttttttagagacggagttgcgctctgttgccccggctggagtgcggtggtgcgatctcggctcgctgcaagctctgcctcccaggttccagcaattctccagccttggcctccccagtagctgagatcacaggcgtgcaccaccacacccagcttttttttgtgtttttagtggagacaggatttcgccatgttggccaggttggagattttatttttcttaagtctcactctgtccagctggagtgcagcagtgtgatctgggtgactgtagcctctgcctccggggttcaagccatcctcccacctgagcctcagagttgctgggattacaggcgtgaaccaccgcttcccactaggtttttgtatttttagtagaggttgggtttcaccatgttggccaggctttggtatccgtgtatcctacacctgctctccgtgccacatgcgcccgcaggttacgccaaggaggccctgaatctggcgcagatgcaggagcagacgctgcagttggagcaacagtccaagctcaaagtgagtggggccggtgtgggcgaggaggccggggcgcacatggggttcaggcgtggagattggtggggctgctactggtgggtagggccaggggcgtgtacatgggcagcagtggggccagggccgagcttgggcgcctcatttcacagagggaaacaaggggaggtgagagacgctgccacagagccgcccgagagggagggtcagtgttggtgagggcgtctggtcgtcctgagggagggccggtgttggtgagggcatctggtcgtcctgagggagggggtcttcttcacattctcacctcatttcttttcactcagcaggattttttattttattttattttattttattttattttattttattttattttatttattttgaaacggagtctcactcttgcctaggctggagtgcaatggcgcaatctcggctcactgcaacctccgcctcccgggttcaagcgattcatctgcctcagcctctggagtagctgggattacaggcacgcgccaccacgcctggctaatgttgtattttagtagagacggggtttctccatgttggtcaggctggtctctaactcccgacctcaggtgatccacccgcctcggcctctcaaactgttgggattacaggcatgtgccaccacgcctggctaatgttgtattttagtagagacggggtttctccatgttggtcaggctggtctctaactcccgacctcaggtgatccacccgcctcggcctctcaaactgctgggattacaggcacgcgccaccacgcctggcctattttattttattttgagacagagtgtcactctgtcccccagtctggcgtgcaatggtttgatctcggctcactgcaacctccacctcccgggttcaacctcctgcctcagccttccgagcagctgggactacaggagcctgccaccacatctggcgaatttttgtatttttagtagagaagggggttcagcatgttgtccaggttggtcttgaactcctgacctcaggtgatccagccactttggcctcacaaagtgctgggattataggcaagagcgatggcgcccggcccactcagcaggattcctagaatgggcacgagctctgccctcatcacagtccaaaagtgagcacctgcctggagctgcccagaaacagccttgtggggtggggttggtgtctgaccttcctccccgggggccttcgcaggcttctctgctggtgcttctgtgcctgtgggtctggattcctccagggcctgatcctgggtgcagatgcagctggaagccctgaacctgctgcacacactagtctgggcacggagtctctgccgtgccggagctgtgcagacacaggagcggctgtcaggcagtgccagccctgagcaagtgccagctggtgagtgctgtgctctgcaggagtatgaggccgccgtggagcagctcaagagcgagcagatccgggcgcaggctgaggagaggaggaagaccctgagcgaggagacccggcagcaccaggccgtaagagcgcaagaggccgcgagggaggcgcccggctgcggggagcggcctggggcaggactgggagctgggtgtggtcccggggcactctggagtcagccattagagctgccctcggaacggccttgcacaaacgcctaagacctgtaaggtccctcactgctgagccggacgggaggtccccgcgcctccccacgtttgtgtgaggctgatggcgcgtcggagtccccggcgctccgcccagtcggcccagactgcagctcccggctgagatgtgtctttgccgccctcttctccccagagggcccagtatcaagacaagctggcccggcagcgctacgaggaccaactgaagcagcaggtgagctcagcctcccctgcgaggcgcctgcgtccctgagaacgtaggtggctttgtgggaccagtcagtgggtcagaggccacggggcaagaacgctggggttgctgacggtgggtgctagagcaggggaaactactcggacagacacgcaccagcacacgtgtacaggcacacatgcagatgtgtgcacacatgtacacggagacacaggcacctgcccacacggacacacactcctcgcacacacactcccggcagacaggcacacacacccctgcacacatgggcacacacacacccctgcacacacgggcccacacactcccctgcacacatggggaaacatgggcccacacacacacacccctgtgcgcacacacccctacacaggggcatggacagacacccgcaaacacacccccacacaacacgggcacgcacacacacaccccgccacaacacaggcacacatacccctgcacacaggcctgcacatacacccccacacaggggcatgctcacgcagcccgcacacacacaggtatgcagacacacccaaacacacatgggtccgcaggcacacactcccgcatggggcatgcacgcaccccccacacacacccgatcacacataggcatgcacacccctctgcacacatgggggcttacacacccccccgcacacgtgggcccgctcacacagcccacacacataccccttcacacaggcacacaccgccccgcacacacgggcctgcacacacacccccacacgggcatgcacacgcccacacacacgggcgcgcacacacccggacatgcacaaacacccacctgcacacacgggcacaccccaccacacacacacacaggcatggacacacgcacaccccctcacacataggcacacatacacaacccaggcacacacccccttgcacagacgggcacgcacacagtcccacacatgggcacacgcgcacacccccgcaaacacacacacgggcacgtgtacgcacccccactcacagtgtgcctcatacatacgggcacgcacctgcacacgagggcacacccccaccccccacccccacacacccccgcacccatgggcacacacacattactgcacgtgagggcatgcacacacacgccctgcacacccccacacacagaccccttgtgtgggttccacagcagcggctctccaggcacgacaagcctccttgtctcccacccgggcgcccagctggcagtctgggaggttctgcttgggagggctggtcagtggcggcgggcgggtctctgggtctatgagaaaagcttgggtgacatctgttccctggtccttagggaccgtcaccttcagtcctgagctcgcaggcggggttcacatgttgcctgttgtgggcattgtagctttaacgtttaattggcggaagacagaagcttccttaagcccagcctgaatcagggcagtggtgttgggaggtcggcccgcggtggcccttgtcagggaagccacagtgggggctgtttctgccactggggagtttgggaccctgaacccatcccctcagtgactgccgtcccagccgatgtcacccgtgtctgtgtcagggtgcggcgtctgcaggtccccaggtgcccaggacgcttggagttctgtggtcctggggcggacgcaacctctggattggtgttgagcatttttctggttttaaaggcttttctctttttctgcggcttcttctcagcaacttctcaatgaggagaatttacggaagcaggaggagtccgtgcagaagcaggaagccatgcggcgaggtaggctgtctgctctcctggctggggcggaggtggcgggggctgcttgtggacccggcgtgcactctgagcctgagttctgccgcccggcccctcatagctaccagtgcagtgggcgaggcctgctggggctccgcggggtggggctgcctctcggaagacacctctgtctgcgagtggacgccaggatctgttcagggagggcaggagctgcttcacttcatgggaagtacaggggcctttgttttttttttgagacggagtctcgctctgtcacccaggcaggagtgcaatagcacgatctcagctcactgcaacctctgcctcccaggtttaagcaattctcctgcctcagcctcccgagtagctgggattataggctcccgccaccacgcccagctaatttttttgtatcttcagtagagaaagggtttcactgtgttggccaggctggtcttgaacttcttgatctcattatccgcctgccttggccttccacagtgctgggattacaggcgtgagcctctgcgttctgcctagaacatgggtctttactgtcctggtttcagtggggatcacaggtatttggtgccatgtggcatttgttggcgagtgctccaggcaaacgtctgtcaccactcttcactgtgggtgggcttgtggcgaggtgtgtgcgtttaatgttcagtagccaggcacgtggcacgtcacgcgtgtctgagttctgacagctgtgtttctgtgtgaggggggcttccttcagaactccgcgttctggttttttgcttcaaagagctcgtcctgagaagttgcctaggcctctgggtcggatttctgccctaatccatgggcagggccggcctgtggcgctgtccctaccaaggtctgtgtgtgtctgtggcacgggcctgtccatggactgggcttgtccgtggagtgggtcggtccatggccttagcctgttggtggcgtgggccggtccacggcatgggcctgtctgtggcgtgggccggtccgtggtgtgggcctgtccgtggccttagcctgttggtggcgtgggccggtccgtggcatgggcctgtctgtggcgttggtctgtccgtggcgtgggccggtccgtggcgtgggccggtccacagtgtgggtggaggtggacgtgctgcactgcatggtgctgagctgccctacctctctggggcagccaccgtggagcgggagatggagctgcggcacaagaatgagatgctgcgagtggagaccgaggcccgggcgcgcgccaaggccgagcgggagaatgcagacatcatccgcgagcagatccgcctgaaggcgtccgagcaccgtcagaccgtcttggagtccatcaggtgagcactgccgaggcccgggccggccacagatggagccccgcaggtgtgagtcgctggtcccagggcgctctccagctcttccaggcctggccgccgtaggctgactccttggtgggggcactgcctcctgtcctggcaaggccgtgccgccatgtcagggcctcaccctcaacctgctctcgctgcgtggtacggatcttcgtgtccttcctggtcacaccactgctttccccgcaggacggctggcaccttgtttggggaaggattccgtgcctttgtgacagaccgggacaaagtgacagccacggtaaacatactcataaaacagggctggcaggtggctgagaggcagcatgtgggggcctcctggagccccaggtcctgtccctgccggctctgcacagccctgtagctctcccagcacagagcaaacccacgttgtacctgctgggctcggctgctcctccctccttgagctgggagaaaaaaatgcagttgccagcctgggccacacggtgagaccccatctctacgaagaataaaacattagctgggtgtgatggtggcgcctgtggtcctgctactcgagaggctgaggtaggaggatcacttaagcccaggaggtttgggctgcagtgagccaacattgcaccactgcactccattcttggcgagagaataagaccttgtctcaagaaaaaaatggccaggcggtagtggctcaggcctgtaatcccagcattttcggaggcggaggtgggcggatcacgaggtccggagatcgagatcatcctggtaagagtgaaaccctgtctctactaaaaaaaagaaaaaaaaagaaaaaaattagctgggtgtggtgacatgtgcctgtaatctcgggaggctgaggcaggagaatcacttgaacccgggtggtggaggttgcaatgagtcgagatcccgccactgcaccccaagaccagcatgaccaacatggtgaaaccccatctctgctaaaaatacaaaaattagcaggccaaggtggcgtgcgcctggaatcccagctgcttgggaggctgaggtaggaaaattggttgaacccaggaggcggaagttgcagtgagctgaaaccgcacaattgcactccaacctgtggaagaagagcgaaactctgtctcaaaaaaacaaacaaaataaataagccaggcctggtggctcactggtgtaatcccagcactttgggaggccaagacgggtggatcacttgaggtcagaagttcatgaccagcctggccaacatggtgaaaacccatctctactaaaaatacaaaaattggccgggcctcgtggcacaggtctgtattagctgagtgtggtgacctgagcctgtaatcccagtcactcgggaggctgaggcaggagaactgcttgaacctggaaggcggaggttgcagtgagccaagatggcaccattgcactccagcctggccacagaacaaaaccctttctctaaaaacaaagtcaagggcgcattaagcagctccttcatgttctcaggtgacaccgtctcaccaacatggcaacaccacctgcaacattcaccgtcacactgaccaggccaccggcaggtgctgcagtcacagcagtgggcgccggcaccacggcagagcaagtgcccactcagtgccgggcacctactgtgtgctgggcggggtggggggacggaggacacagccatgtgcgacctggggcgccaccacagcaggccagagcctgggcacaaaagagcgaggctttaaacgagagaagaatctgaacttcaaactctcagggttttattccgaataacgaaagtttttgcgaaatggagtcgggttcgctttctgggtctttgatttttttttttttgagacagagtctcactttcaagtgtgctgctcaagtgcagtggcgcgatctcgactcactgtcagcttcgcctcttgggttcacaccattctcctgtctcagcctccggagtagctgggactacaggtgtctgtcgccacgcccggctaatttttttgtatttttagtagagagagggtttcatcctgttagccaagatggtttcgatctcctgacctcgtgaatccgccgcgtgggcctcccaaagtgctgggattacgggcgtgagccaccgtgctcagccacagccagctaattttttcatgtttttagtagagacgaggtttttccaggttggttaggctggtcttgaactccaacctctggtgatacgccggccttggcctcccaaagtgctgggattacagacctggccagcctaaacgatttttaaaacaagttagagattttgggttagtcttgttttccaggaataaagtaccatttttagtggccaaggatgtaccagagggtgtggccctgtgacatccagctgggtctgcccagggccccgctcagcgaccgaggctttctaggatttatgctgccagttgcagagaaaatggccctgagtgagggcgttatgactgccccacctgcctcctgtaaccgcgtggctgtgggattcggggctgggaattcgggttcctgtggggccagcacacggccctgtgcttctccctcaggcggagagagggtgggggcagccccgtgcgtctcctgctctaggagggagggacggtgggggccggtgcgccagtgcggtgtctctgctgcaggtggctgggctgacgctgctggctgtcggggtctactcagccaagaatgcgacagccgtcactggccgcttcatcgaggctcggctggggaagccgtccctagtgagggagacgtcccgcatcacggtgctggaggcgctgcggcaccccatccaggtagcggcgcaggcctggccctccctgagtgcagttcctggctgagtcccttctgccccacgagcacagcccacgcacaccctcccgtcccttccctttccccggataacaggcacccgcacgctgcttcacgggtgggttttcctgtctggcgctgtaccttaggggtctgcatcagtgagacccttcccctgtctgcctcggtgtcccttgctcagggctcttgatggggcctgggagcacatcggggtccttgcaagacccgggacttgggtgtgcggccgtctgtcggggaagctgctacaggccatggcgtctggtggcctccctggggagccgcgccgcttgccagcccctgaggtgcctgctctccacaggtcactgggtaggtggttaagaaaataaaagccaataaggaaccggaaaatgccccaatcccagcaatagcctcctggtctcccggcggggcagggttccagctccgggccggtcctggctgtgctttggggcagctccgtttctgtgtgttaccgagcatgtgtgtgcgttggtggctgttccgtggctgtggcaggtgacccaatggtgcttccccttcccctccggcaggtcagccggcggctcctcagtcgaccccaggacgtgctggagggtgttgtgcttagtgtaagtcggtgtgcctgggaccggggaggtgcagggaggggaccccggagctgggctgggctgtggcccttgctagcgctcgtggtggcgcccaggagcttttgggtcctgagatgcaactgcttggactgtgccggggatagataggctgcccacgagctgggcggcttcctgaggagcagagtccgcacccgggcattcccgcagcccctgtcaccgaggcttccgtgggtgcagagtgtctcccccaaacccccgtcttccccggcagcccagcctggaagcacgggtgcgcgacatcgccatagcaacaaggaacaccaagaagaaccggggcctgtacaggcacatcctgctgtatgggccaccaggcaccgggaagacgctgtttgccaaggtgagagcgcctggctgaacaggtgggccaggggccgctggggtctcacctgcctgcaggtgtctgggggcctcagccgcctggggaatggaccccccttaggcctttgcctaccctcgtgtaggctcagggtgctggtgtgggcagcagcgcctcccatcttccaggcgggggacgtctcctgtctggcaggctgtggcttccagacagggacacccggcaggggctccacactccaggtggagtgtgcaggctttgcagaggcagagggaacatctgttctgtctcccctcactcttcttgtccagaaactcgccctgcactcaggcatggactacgccatcatgacaggcggggacgtggcccccatggggcaggaaggcgtgaccgccatgcacaagctctttgactgggccaataccagccggcgcgggtgagacgtccccacagcatgcaccaggcccttggctgcggcccagcaggctgccttctgggaagggggtccaggtgtctcttggggaccctgtctttctgcagctctgtccttgtggccacgcaggaggcccaatggagggtccctcggagggaaagtcccctgagtgtggaccctggtggacacgaggtccccagcgtgtggaggctgccagtgggatacttggctcagggcagaagggaggtgggtgggtgcagggggagaggggtcttcacagctgcaggggaggctcctccacagccgccctccccccaacacgcctgcaggtgggcgtgggcactggttgccttttctagaaccatttgaaagttagctgaagacagcatggcacactcccttcaataggtcccacagtgaccccgcgcagggcacagcccgggcacccttgtggcctcggctgtcctcgttggaaccacgatcctcatggttggcaccctcccctctggcctttgacctttcactttagaagacctgtccctgcgccaggcgtggtggctcacggctgtaatcccagactttcggaggcggaggcaggcagatacgaggccaggagattgagaccatcctggctaacttggtgaaaccccgtctctactaaaaatacaaaaaattagccaggcatggtggtgggcacctgtagtcccagctactcaggaggctgaggcaggagaatggcgtgaacccgggaggcagagcctgcagtgagccgagattgcgccactgcactccagcctgggagacagagcgagactctgtctcaaaaaaaaaaaaaaagaccctgctccttgcgtggactcttgagcactgcactgggtcgctgtgtgggtgaaacctgcagggcggaggctgttgccccatgtgtggttggctggtgtgtgggtgaaacctgcagggcagagtctgttgccccctgtgtagttggtttcccactgccttctgaggctgagacgtggtcagctgcccagaggccaggctgatcggcttctgtcgagtccaggacttagggctcctgatggggcagagcctgaccccgtggggatctgcctgcctggcctgctcctgccgcggccggacgctgctgtgggctgctcctggcgtcactctcgccttgcttggcctctctctcgttcacagcctcctgctcttcatggatgaagcggacgccttccttcggaagcgagccactgtgagtgtcactaagcctctgtctggccacaggagggtggtcgggtgggcgcggctgtcatcctgggccaggctgcagcccttaagctggcttgcagtggcgcaatcttggctcgctgcaacctctgcctcctgggttcaagctgctctcctgcctcagccccctgagtagctgggattacaggtgtttgccaccacacctagttaagttttttgtatttttagtagagatggggtttcaccatgttggtcaagttggtcaagaactcctgatctcaaatgatctgcccacctggcctcccaaaatgctgggattacatgcgtgatccaccacgcccagccatacagttattattttaatacagggtgtctgtcgcccaggctggagtgcaggggcgacatctccagctcaagcagtcctcctgcctcagcctcccgagaagctgggattgcagaggcacactaacacgcccggctaatttttttgtaacgttagtagagatggagtttcccacattgtccaggcagggctcaaacttctgaactaaagaaattcaccggccttggcctggcacagtggctcacgtgtgtaatcccagcactttgggaggccaaggcaggtggatgacgaggtcaggagttcaagaccagcttggtcaatatggtgaaaccccgtctatagtaaaaatacaaaaattagccgggcgtcgtggggcacgcatgtaatcccagctgctcgggatgctgatgcaggagaatcgcttgaacccaggaggcagaggttgcagtgagctgagatcgtgccactgcactccagactgagagacagaacaagacttcgtctcaaaaaaaaaaagcgagagatttgatcgccttgaccttctgaagtgctaggattaaagatgtgagccctcagtcaggctttttttttaaatgtattttttattttttagcaattctcatgcctcagcctcccaagtggcttgagattacaggtgtgccaccatgcatggctaatttttgtatttctagtacagatggggtctcaccatgttggccaggctggtctcaaactccctacctcaggtgatccgcctgcctcagcctcccaaaatgctgggttacatgcttgagccaccgcccctggccctggtcaggattttgagtttagatccatgaaagtgtcgccacgtccctgctccctgcaggagggaggcctgtgggactttctgctctggctgtttacaaggctttgcttctggtgcctaaggctggaaccttctctctgcaggaggagataagcaaggacctcagagccacactgaacgccttcctgtaccacatgggccaacacagcaacaagtgagggagcccctcgggtcctgagcccccgggcagggctgtgcagccgtcgcccttggttcccactgagggtccctggctcacagtgctgggcaccagctgtggcctcagtgtgcccacctcagatgtcccctgggaacggcccagctcgggacagcacggggtgtcattgaggaacatgcaggggcctcccgggcagagctggggtcagtcctgtcttcacggccctgtgcgccgccgccccagcttgcaggtccctctgcccctagatttctgcggtcctgtgcctgcaagggaggtggtctgattgctgccgcccagaggtccccagtagggtgaccggccctatgtccaggctccctcttccctcccaaatcccttaattttgagttttcttggtctcctgggcccctccagccccagtcacgtgtcacacggaggatcaagtcctgctggtcggccgtggctgactcttcaggcacgttgggctcctgggtcagctgctgccgttcgacgctccctggagccctgactcaggtccttcccagagaggcaaggctggggccctgctgagcctctgctgaacccgggcccccgaggtcctgcttctggctcgcatggccataatcttgacagggactctgggtccgcatccctgctcccagcacagcgggctcaggtagcaggagggagtggtgttcccggcactgcctatcaggctgggcgacggtcagcggggaagtaccacacggggcgagaacagaggcccgagaagccgggcggggggcagctgggcgtggtggggcaggcaggcgggtgaccagggctgtggcgcgttctccccatgtttcctgtgctcacaagctgccgctttagattctcccaaaaagtctccccgagggggctgaggagccgttttgccctcggcgatctcagctggcagccccagcgtttccttccccatccctgtcctacagattcatgctggtcctggccagcaatctgcctgagcagttcgactgtgccatcaacagccgcatcgacgtgatggtccacttcgacctgccgcagcaggaggagcgggacgcctggtgagactgcattttgacaactgtgttcttaagccggccacagaaggaaaacggtgagtgtcccgcctcacccggcccccaatccaggcaccatatggcatgggtgtaggccagctgcctgtcttccggcctccacctcatggtgtggggtccgcggccttggctgcctcacttgggaactccttccccaggcgcctgaagctggcccagtttgactacgggaggaagtgctcggaggtcgctcggctgacggagggcatgtcgggccgggagatcgctcagctggccgtgtcctggcaggtgagtcaggctccggcacgtccacccagacgggaccccagctgctgtggagatgctcagttgcgccaggcctgtcccagcaccggtgtcatgtgggagcttctgttgaggggttttcagtgcacagacgtgacacagggccccctgcctcagtcgggccactccacgcagcagcgtgcacctgctcgtgccctcaggagggtggggccatgttggttgctgacagtcacacggggctctctggaagccagtccagcatcccaggtgcccgggctctgctgggtgtggtgggaggtttctggctctcatcttggccaacaggcacctcctagagggaatggtcgtcaggacaggccccgtgtgagttgggtggtgggggtggagggacgttgtgtttcctggaccaggtcccttggcttggtcctgtttgacgggttcagacacacggtgggactggcctccgattgtcccacagttagttgttcctcggaggcacccctcctgctgctccttggatactccagggccgaggagccgagactcactggagtgtgggcatggccatccagagagctctgatcaggccgggcgcggtggctcacgcctgcaatcccagcactttgggaggctgaggcaggcatatcacggggtcagattgagaccatcctggccaatatgtcgaaaccccgtctctactaaaaatacaaaaattagctgagtttggtggtgcatgcctgttatcccagccacacgggaggctgaggcagaagaattgcttgacccggggagttggaggttgcaatgagccaagatcgcaccaccgcactccagcctggccaaagattgagactccatctcaaaataaaagaaagctttggtctttgggggttgctgaaaaagcaaaaccaggtctgtggggtagaaggcgccctggccacacacaggcattgccgcctctggggtccgcagagtctgtgtgacaacctggtcactcgatctagcagcgtatttgaatgaatgagtgacagcttaatgaagtagccaagtaccttgatttgaacgtaggagccggggtatgtagggagctgtattagtcagtacaggctgggttatgccgctgtgacaaagagtcccagatctcaaaccccgtccttgtgggtcagctgaggtctctgttccaggccgtccccacttggaaccaggtctgtttccacaactcagaaagtggaggctgggtatggtggtggctgacgcttgtattcccagcatttggggaggccaagtcagtcagattatttgaagccaggggttcaggaccagcctggaaagcaaggtgagaccccatctctacaaaaaatgaaaaaattggccggacctagtggcacatgcctgtaatgccagctgcttgggaggctgaggtgggagggtcacttgagtccaggaggcggaggctgcagtgagctgtgattgtgccactgcactccagcctgggttacagagcaagaccctgtcttaaaaactgagaataatttggaacaagcccggtggctcactcctgtaatcccagcatgttgggaggccaaggagagaagatcacttgaggtcaggagttcaagaccagcctggccaacatgatgaaccccacctctacaaaaaatacgaaaattagctgggtgtggtggtgggtgcctgtaatcccagctactcaggaggctgaggcaggagaattgcttgaacccacgaggcagaggatgcggtgagctgagatcatgccactgcactgtagcctgagggacagagtgagactgtctcaaaaataataataagaagaataataatttgggctgggcacagtggcacatgcctgtaatcccagcactttgggaggccgaggtgttggatcacttgaggtcaggagttcgaggccagcctggccagtgtgccgagacccccacctctactaaaaatacaaaaattaactggacggggccgggtgtggtgacttatgcctctaatcccagcactttgggaggccgaggtgggcggatcacggggtcaggagttcaagaccagcctggacaacatggtgaaaccccatctctactaaaaaataaaaaaattatccaggcgtggtggctggcgcctgtagtcccagctactcaggaggctgaggcaggagaatcgcttgaacccgggaggtggaggttgcagtgagctgagatggtgccactgcactccatcctgggtgtcagagcgatactccatctccaaaaaaaaaaaaaaagaaagaaattaacctggtgtggtagcaggcacctgtaatcccagctgctcgggaggctgagtcaggagaattgctggaactcaggaggcagaggttgcagtgagctaagatcacgccacagcactccagtctgggcgacagagcgaaactgtctcaaaatataaatgataacagtaataatttggcttggcacggtggctcttacatgtagcattttctacacataagattatgtcacctgagaacaggtgattttacctctcccttttcagtttggatgacttttctttttcttgtcccatatctctggccagagcttccagcgatatgtggaatagaagtggtcagaattcttgcttggttctttctcagaggaagctttcagtttttcaccactgagtatgttagctgtggacttgtgatcgctggccttctttgtgtttagggcatgttcttcaatcctggtttgttaattttttttgtttcttttcttttcttttggtggggggaccagtctcgcttttgccgcccaggctggagtgcagtagagacagggtttcaccatgttggccaggctggtctcgaactcctgacgtcaggtgacctgcccacctcagcctcccaaagtgctgggattacaggtgtgagccactgcaaccgaccagttgaattttttttttttaatcataaaagtgtgttgaattttgtcaaatgcttttcctgcatgagatgagagggtcatgtggtttccttcctccactctgctaatattgattgattttcatatattgaactatccttgcattccaggaatgaatcctgcttggttagggtgtagagtcctttaactatactgctaaattcgttttgctggcattttgttgaggactttcccagtgaggctcatcagggatattggcctgccatttctcttgtggtgtgtttgtctggctttaatatgagggtaatgctggcttcctaggatgagtgaggaaatgttcttcaatttgtccaagagtttgaggagtggtactgattcttcttaatgttttgtgaattcacatgtgaagaaatcaggtccaggtcttctctttgaccttttatagcttgaagatcttaggttcccagaaaaattgcaagggtagcacagagagctcccgggcccggggccttcccacatggtgaacatcatgtgtcactgttggacccacccgcgaccaggttttgccccagaatcccacccaggaggccacgtgacatttagctgtcacttctggtgggctcctgccaggtcccgtgcttcctggaggggtggccctgtgagcatctgcgtagcccctctcctctgctgggccctgggtgacgtgcagccactcgggtggaccctgagggtccctgcacctgtttgccctctcttgggtgggctcaagaccaaaaatgatgttgagcagtcctgggcccctgagccacagtggcggtgcggctccggtcagtgtctcctgcgctcccgggcccccgacccacagtggcggtccggctctggtcagtgtctcctgcgctcccgggcccccgacccacagtggcggtccggctccggtcggtgtctccccacacagtggctcttggcgaggggtgggcgctggcagaggggacgggcaccacgtggtcatccccatgacaggttctgtcatggtgacagtgttgtgggaggatggtgtgctgctgcccctgcaccccgtgagatgaatcctgcctctgggaggtacagctgggacggggcgagggacccactcagctgtccaggaagggtcccctgccctgtgcttcctccaggtgtcctggtgcactcctgagcacggcacctagtgggggtccccacaccctcaccctgacccatgggtgcctccccttggggactccacgcccttcgctggcactgagatggagagcgacctgtccgtggcagaagggctgctgcacctgaggtgcctaaggcgacaccaagggccacagccccagtagctccagcctccgtgtgctcaatgccaagccctgtgcccaggaggacagggaaatggaggcagaggtggccttgatgtcccaaggtgggcagtggctgcctctgccctggaggcctgtgagggtcagggtctgagggtctgaggtgcactatgacccgggggcactgcctggccacggctgagactcgcagagggtctgcagttcccacctgcctctcggaagctgccctgggtcagccgtcagtggtgctccgccttgggttttctattatcagaaagtcattgagcaacagcagtgctgaggacgcaggcagggctgtgggcactgcagggccgctgccagtgtccacatgcgtgctggctctgccaaggtgtgggaagcctgtgtttcaccctgaggttgtcctggtgcccctggtttggcccctccccacctcggggccctggcgtgcattaagggtggcgggttcccatagcggcctccctcagctccctctctcttcactaggccacggcatatgcctccaaggacggggtcctcactgaggccatgatggacgcctgtgtgcaagatgctgtccagcagtaccgacagaagatgcgctggctgaaggcggaggggcctgggcgcggggtcgagcaccccctatccggagtccaaggcgagaccctcacctcatggagcctggccacggacccctcctacccctgccttgccggcccctgcacatttaggatatgctcctggatggggactgggctgtgcagggacctctgtcccccaggatgtcttgtggtggcggtcggccgttctgccccccagggcaccccctgttgtaggcactggctagggaggggcaggcctccttcctgcccctcgagacactcttgggagatgcattttccgtctggctcacagggggagggtgaggctttgtaccccagcccctgcccaggccactgtgagggtgggtgctggctgagcccctgggcgagaaggagtggggcaggcggggtctttgttctcggctcccacagcagagccaggtgagggggggcctgccaggactagacagaagtggggcggcctgaaccctgcttccagccatggccaggggccacggaacccggcaggggtgtctgaggccgccctgtcagctggccggtccaagcctgtggctggagctggtgtgtgtttatctaataaagtcccacaggtgcctcacc

SEQ ID NO: 1683 - DNA, 490 bp, Homo sapiens
atgtcaactactgactagaactggtggaaaaggttgtttactgaaactgcgaggaaggtagactttaaaatgcaggacaaagactgaacatactgatatactgattctttgaagggaagtttagaactcattgtatctaacattattcaggcttaaaacagtttccaatccagtgggaaaagtcactccatatattccgtgaagtcaaccagttccatcaaggagaaagtcagggccgctgggagcgcgtggaccgtgggctccggggcggcgcctgcccgggcaccccggccccgtccacgccccgcaagaggagctcgctggccccgccacgcgggaaggggtcgccccggggtcttgggcgggagggccgtgcgggctgcggagacaccgaggaggggaggcgcctctcctgagctcttggcgcagcgaccccagggcgccgactcatcgcggaagggctcggcttgcccgggcgccggtgccgcct

SEQ ID NO: 1684 - DNA, 318 bp, Homo sapiens
aactggtggaaaaagttgtttattgcaactgcgaggaagttagactttaaaatgcagaacaaagactgaacatactgacataccggttctttgaagggaaatttagaattcattgtatataacattattcaggcttaaaatagtttccaatccagtgggacgagtcactccatataattctgtgaagtcaaccattcctatcaaggagagagtcggggccgccgcgagcgcgtgaaccgtgggctccggggtggtgccgacgcggctgcgggccgggactgacgttgcgccgggttcgagtactcccctccggagttt

SEQ ID NO: 1685 - DNA, 517 bp, Homo sapiens
atttgaagagggcttgccttccaacctataggcactatatatgcttttggaaaaagtaattaggttaagatgcagttgttttgttttgctttgtttttcccttagctgggttggggtttctagcagcaatgatgtacaggtggatcttttttcacattaacactaccagctgctccatggctatagtgcttaggaatatctcagaatttcaacagatctatcagctgcaatatctaggagtcttgccaacacagagacacattcacatgctgaaaagagcatgagttgaaggcacagctggggacttttgatgcaggtccagaactggatggttgtgaagccattagagatatttaaattgtccagaatttcaggctctgctttaaaaactaggctacaaaccctcattcagaaagaggtcagtaatatgcctgtgagttagaaagatactggaaacatttcaatgccaaaagtaacatttttttccagaatgctatgactaaattttttaaaaaaa

SEQ ID NO: 1686 - DNA, 18501 bp, Homo sapiens
  misc_feature (9479)..(9480): n equals a,t,g, or c
cccctgccttttttttttttttttttgagacggagtcttgctccgtcgcccaggttggaatgcagtggcgcgatctcggctcactgcaagctcgactcccgggttcaccccattctcctgcctcagcatcctgagtagctggagctacaggtgcccgcaaccacgcccggctaatttttttgtatttttagtagagacagggtttcaccgtgttagccaggatggtctcgatttcctgacctcgtgatccgcccacatcggcctcccaaagtgctgggattacaggcgtgagccaccgcgccctgccagcccctgctcttttcaaagcctgcttctgcagctgcttcatcaatgctatttactcccaattatctttccaatcaattcccttttgctcaaattggagtcagtttctgttgctttcaacccaaagaacagttaactgatccagctttcatcatctggcccatttccagtcttagttccctccagcatatgccataaccatagctcagtggttctcaaacctgagagtgcaaaacaatcacctagaggtcctgttaaaacaaatttctgggctccattagcagcagttcagttcccaagtgatgctacctctctggtctaggaaccactgctctagagttctctttacatctccccagcgtatacccctatttgggtagggtattcaactgtcccattttgcccaggacttaaaggtttccagggaagtaggactttcagtgctgaaaccaagccagtctagggcaaactggactgtaggaattgtagctgcaaagagccattctcttcaccacccacaggaaatagaaatgaaatgtaaacactttcattccactctcctttgtccccattaaggaaggacttggtaggcacactcagcagatgaaacattaaaaggctgcctctccttggcatagaaatcactttctgatacagagaatggacttaagcaggtatccacagagactactttatttatttacaatgccatagtttagaaaacaatcactcctgtacgtggttcttaccttaaggtcaccggaggagaacatgctgatgtaattgttgaccatcttaaacacataccctcggtccataaatgtaaagcagcgctaaaatagataaaattctaaatttaaacacttttacttgaagaatcattaaagattttagaaaatatgattaaatatattgaagtaaaataacactaaactaaatgtgttgtataattaggtatttaaaaaatcttctaaagatgtttaagcagtcatccacatatggcaactaaaataactacaatttatattaaaaatgaaaatgaaacagggcaatatactaacagagaataggtacatttaaaaattcagaagaaaacaagaaaaattgaaaggaaaaacagaatgaaagcataaatgaataaaacaaaaatatcaatcagaaagttataaatctatattgattttataaaatgtcactggagctttgcaatgaaatattatagccccttcttttttatacagaaagctttagctttcggttgtctacttttttaaccacttagttacattttattattttcttttaataattccatttcacacttatggggttgtaaatcttctcctgtacacactgggtcataatgaggagtggtagagacgagtcaggaaagccttttaaatctcactggccccttttgacagagtagctcctctccttatcagctgaggaagcttgcatttgaaggctgaaggaaggagatcgtaagatttctatcagcgagctgcttactacctttcttattctgtggtcaaattctctttactgtatcaaggagagtcttaaacagtaagtaggcttggaggagcacttgctctctctccaaaagacggatggtcatgtaaccagtaaccaagctaccacggccaaagactgcacaggcaaagtgtggagcaggaggaagggaccatagttcccaacgcaggatctggggaggcactagagcaggtgcctcccatagtggatctgcagctcattacttggtgtgtgagtctcattctattcacccacgtgggtgtgagtaaacatgctgcttgggaaaattccacagctggtgtggagtgcttctttcttgtcgaaagtgtccaggatgatccattaaaatggttttgcatttcttggagtctctcctcaattttactcacagacaggactacacataaaatcttgctatggagagtggaccaagagctctatggaaaacattcatttattccaaaagcacaagctatttaagccaagtagagtagatatgaagggttttcactttttagagacttgcttatccatccttatctgatatttagagagaaataccacagatgtttaaaccaagtctctctctaatattaggtgatttccaaatggttttcaacagctcattgaaacaaagcagtggttagtcaggcgaatgggctaaaagatacggctatccaatcagcaaaataaaaatcagaatgaatcagcctttgctaccatcttggtattgtgcttcataaaaagagtgtctaaataggtatgttcagataagtagagctgtgacccaggtgggtggcaaaaagaaaaatgacaaaagctgcaatcatttgaatcctatttacttcactgagagaatagttgagaaatgtacaagctttttggcataattgctgaaaaaatattactttcccataatgtggggtaagggaggctaccttttaatgtagaacatttttatatgcccacacactggttcccagaggttcttcttgattcttggagaccaattttgagcaacccatggagttacaataatattttaattgttaaattccaatgttgactaattcacagtatttgctaatgtagacttcaataacaaaaagaggtagcagtcatttgaagccccaattgagcaaataactattgtttgctggaaatataagagatttatgacatcagcactaggagtgggctgtgttgagcatctgaaaactcaaatttattggaattgcaccaaatgactacgttcagttttacattttcaaaaatcactttcttttcctttcttttttttctctcctagctcaaatgattcatctaataagtgttccaattttttttaatattatgtgtcaaataaatgccattaaaacttcaaattagtaataaggagggtaactatgaggtcttttcccttttttagagacttgcttattcgtcattttttgcagtttagggaagaatatttcagatgtttctttcaatatattttatttgcaaactgaactatacataattctttctaagtttcctagtaaactattagcatagcaataaactttattcccataggtcttaaaatgtggtagaaaactacagtaacttttcccccctttaaacttttcccctttaacacttatcattcttgtctctttctggaagcaagaaaaaagtaaaaatcagagacaaaaccttgaagaaaaaaataaattcaggataagaacacatacagtgtataatttgaaatagtttttaacacattaaaaaaaagaaattaggctggattaaagctcaccagtgacaagttgggcccattttccacttctataggcttttaactgtatattattagcatttatttatacattctcacactcacccatatgttctggtgactaccattaagaaacaagtcaaatgacttcataaaggttatagtagtcaagagttagactaaagaaggaggcacagaaaactattatctttctaattgcttgcattatctgttaaatggtatactgtaattatgtatcttagttttttcttcgactttgcatttctttcctctcagctcaatataaatggttgtaacccaatgaaatataactaatttccatacatatccagtttagtaagtagctactcaatactttacttgataatttttctttcatgggatcagtgtgatctttccataatgtaaaaaacagcgtgggtcaaccttggtggctcacacctgtcatcccagcacttagggaggccaatctcttgagctcaggagtttgaaaccagcctgggctacgtggcaaaaccccgtctctacaaaaaatacaaaaattagccaggtttgtgtctgtgtcctactcaggaggctgaggtgggaggatcgcctgagcccagggaggttgaggctacagtgagttgtgatcatgccagtgtgctccagcttgggttgacagagtgagatcctgtctcaaaaagaaataaagaaaaaaaagagcctggagataataaacaaaaatgctaaattcctgaagcgtttcccaaagtggctatttggtatcactgtcagagctaaagccattataacatcactttcaaaggcagaaatgtccaagagaataatattactgtagtgcagcttcctttttaaaaatttcattttttctcttaaaatatatttagaaatactatgatttgactgcactcaaatggatacttttctctaaccttagttttttttttctttcttcctgtcttttttttttttgagacagtctctctctgtcaccaggctagagtgcagtggtgtgatctcggctcactgcaacctccgcctcccaggttcaagtgattctcctgcctcagcctcccaaatagctaggactacaggcacgcaccaccacgcccagctaatttttgtatttttagtagacacggggtttcaccatgttggccaggatggtctctatctcttgacctcatgatctgcccgccttggcctcccaaagtgctgggattacaagcataagccatcgcgcccggccttctaaccttagtctttattcaataagacttcaaattgaaaaaaaaaattaaaaagtatttcaagcaataaagatgtataaatgaaagttttcatctgacagtgctagttttgatttttcatcatacatgaagatgtgaactgatgaaagtttagactatcttgcatccaccaacatggggccttgaatagaactgcgatctcatataactgtaccttgagaaatctggcaacgctgtggtttgcccttcttgtttcttcaagtgcatccttgtatttccaaatcacatggtcggataggaccatgacaagattgtccaattcattttggtaagattcaggaaatctctgaggccggggaagctaaggaaagaacggattatatctttctaatgtggcatgtgaaatattaagccgaggaagtatcaactgaaatatttactttattttataggtcattaaagaaaaagaatccttttgaaaacttgaaagcagtaataaaatagaagccttttactttcaaggtcatgatttccatcattaatatttagtgtttccttcaattttggtcaataaaattttcactttataataaaagtcaatcataacaaatattaattgcaaactattgaaacaatgtagcaatgtacaaagtaaaatgtgaaccttctctgtggcctctcatatcttactttccctccttccctctcagggaatagctactattaatggttaatgaacattattctagatattttggacatgtagttctctatttcatttaaaaataaattattttgatttttttacaactaggaatgcccccaataaactagtctaagaaattaataaatgaataactgaatgaatacagatattggtttgaaatgtcctctgacatttggtgagtcccagctagttttaactccctggtcccagtatatgccacagttaagagacaccagtgggacctcacaagtcaagataaagaagggcttggctgtgagatgacattacatccactgaataaagctctatggatctcaaaagaccatttcaggtccagatatccatccctcctgtttggactcctgcatatgaggggaacatttgaggcagccgagttcttccatctcagactctgcttttttttttttttttttttttttggagacagggtctttctgtgtcacccagattggagtgcaatggtgtgatctcagctcactgcaacctctacctcctcagtttaagtaattgtcccacctcagcctcccaagtggctaggactacaggcgccctcctgtagtccatacccagctaatttttagtagtgacagggtttcgtcatgttggccaggttggtcttgaactcctgacctcaagtgatctgcttgccttggcctcccaaactgctaggattacaagtgtgagcccccgtgcccagccttacttctgataagattcattcatctttaccagctggctttaaaaattagacccagacacattttcactatagatagaatcatggaatttagagttacactgaactgtgtatttctaaattgtgagcacccagacttccatgctgcaaggataaaaatcatgaaggctgaagttacaggagttgtatgaaacagatatttaatggaatttaacgggatgttggagctggtttaggctggcttctatttttttttttttttttttgagatggagtttcgctctgttgtccaggctggagtgcagtggtacgatctcagatcactgcaacctccgcctcctgggttcaagcaattctctgcttcagcctcctgagtagctgggattacaggcacctgccaccacacctggctaatttttgtattttttagtagagatggggtttcaccatcttggccaggctggtcttaaactcctgacctcatgatccaccagcctcagcttcccaaagtgctgggattacaggcttgagccaccccgcctggccagactggcttctatttttaagccactttaccaggacatcactgcatggatatttttgaaaatttcatggttactctctatatatttaaaatttattgttgaaatcaaataaattaacaactaatgaacttaactgatttgatcacacacagcatttttaaattctcttccataaaacttgggtaataaaggtaaacaattcacctacaaaaagcaacagtcaccttttaaagaatcaaagcacacttttaattttcaattttcgttttgttagtcctctaaaattccttaagcatatcatacgtacattttccccacatgcatatgcatgaatgccttgggctttaatattccatttgttccttcctctttacaccttcctctcaaagtctcctgtggcctactctcactctgaacccaaagatgtctgcctaataaatatatgagtacttttaaaactgttttcccgaagtatatcctaaagactcgaggtggaagaattcctgcactggagattgtgaattttttgtctcaggagatgaagggagtgagatggtggcacacttcccaagctgcagagctggaccatgatgaatctgagctacagcatggcgaggtcaaggggaacaggcctgggatgcatgggcagaactgtaggcttttgggagttttgttagaaacaaggaggatgatgggaaacaaaaggtttagctggttcaatgatccttttgctactagagaataatgttgagaaaacattcagtggttcccaggaaattgttttagtttgtttgtgttttgttttgtttgagacagagtctctgtggcccaggctggagtgcagtggtgcaatctcagctcactgcaaactccacctcccgggtttaagcaattctcgtgcctcagcctcctgagtagctgggattacaggtgtgtgccaccacatccagctaacttttgtatttttaatagagatggggttttgccattttggccaggctagtcttgaactcctgacctcaggtgatctgcccacctcagcctcccaaagtgctgggattacaggcatgagcaactacacccagccattcccaggaaactggaactcacgctggccaagtgcccaacaacattgcaccttttagaggactaaaccagatatctcccctgacttcctcagatcttccacacttactccttggatgatggaaattcctttaatagtggagaaaaccattcacttcacaatttaaaaagaaaaaaaaaagaaaatacaaatagcttgggaaaagtttactgtgaatgctttggtgtcaaatgataatatcagggctgggtacaatggctcacgcctgtaatcccagtactttgggaggctgagatgggcagatcacttgagcccaagagttcgagaccagcctgggcaacatgacgaaaccccatctttactaaatatatataattatctatctatctatctatctatctatctatctatctatctatctatctatcatctatcaatcatctatatgaaattagctgggcttggtggccatgcctgtagtcccagctactagggatgctgaggtgagagaatcacctaagttggggaagttgaggctgcagtgagctatgattgtgccactgcactccagcctgggcaacaggagtgagaccgtgtatcaaggggaaaaaaaaatgggccatgcgtggtggctcatgcctgtaattccagcactttgggaggctgaggtgggtggatcacctaaggtcaggagttggagaccagtctggccaacatggtgaaaccccgtctctactaaaaatgcaaaaattagctgggtgtggtggcatgcacctgtaatccaagctgcttgggaggctgaggcaggagaaccacttcaacccaggaggtggagcttgcagtgagccgagatcgtgccactgcactccagtgtgggcgacagagcgaaactccgtctcaaaaaaaaaaaaaaaaagtaaagaaaaaagatgatatcaggtcttttcccactgtgatgattagagatggttagagtggaaggtgcagggctcctgaaagaaaactagggtgtgagggttaccactgaaaggggtcacggaaagcaaacctcaatcggagaagataaactgctggacacaatcatgctggctattatcagttcatttattcttaggctgctcacaggtgtgttttgtgacctgtctatacaagcagatgcatactggtaggaactagaagagaattttagtccaatccactcttcttacagatgagaaaacaggcactgagatgttaagcgtcgttttcgtcagctaacaagttagtgacagagcaggaattgcaacagtgaggtttcctgaccccagtagagcttaacaacagagagatacgaaccatttttacctttgtgttagattttctctccctcccaggtaggaggctctcatctccagaagtggagagcagaaatagcagaaaagcaaaaataggatttgcgagttaagagttatggaactccacagatgattaaaggtccagcaagccatttctgtcatactagatcanngccatggttacatagacctggggcctagaagcatggatgaggacctctggatggatgactctgaggaagtggctctgcacacttccctgaagccttagtgctagcagaagtttaattcctccctattaagtgtcagcactcctcccatgcaagatgatattgcaaaggcctctccctgctagaaatcaggcaaacccttgaggagttgtcccgcctctccttctggtgatcagggcaatacctggaggttaaatcctagcttaacccagctgggggcttgctgggcctaataaagcaggaaagagaatatacccaaagaggctataaaaattagctatcatgtaccaccaggaggtagggcagaacctctgcaattgtacattgaggatgtgggccagaaagtaagggcaggtaacttagaatgcattgacatgggtgtgctttttcagaacatgggattaaataaggactcacgggatgagcaactcactgctagggttgctctgagaatctagagatggcctactttaagcaaagtcgaaatgtctggttgtcctggcagaggatagaggaaaaaataaagaggtggagggaggtggatatacaggaatggacattaattgagactggaagatccaccagtgtatcaagttccccaggcaggcccagaagacagcatgcaccatggccactaagaaggtgctggggaccaatatcattaagaaggtcaggggtgtttcccatctgttggcaggaggagcagtcacagtcttggctcatgagcagccatggggatcagggatcaccaaaacaacagaggccatgtgctgtgcttaatctccaggagccagggggctgtgagtatcatgacaaatgacaagactggtggggaagccaagagggaccgactctcagggagttgtagagctggttaatgatgactggaactcctagggacaaaacagagagcaaccaacaatggtggtacatcatattaacaaagaaggcaagaatgggcaactggaagatggggatgttcattccaatgaatagtcatggttcctttgtctgttcctggacctgagtcacaattcagatctggtacacattgactgaagaggtgatggggtccctaaaggaaagcccccactgcaacaatgcagtagatacatactgtaatgagtctatcaattcttctccaaagggccctatagccatttactcaggctactgtacactgagaagaagggcatatagttcaaggactgttgcacacagaatctgagttgacattgatatccagaaatgaaaagcatcaccatgtctgccctgatagagtggggacttacagggattaaaggtggagtcctgactaaagttctgttaacagtagatccactgggttcaaagatccccccaatagtcatgtaactggtcccaaatgtataatttgtattaataaaactggcatttggagtaagcttgcacgggtgcttggtctgtggaggtatcctagtgggggaggccaggtgggagcttctgacactgcttcttccccaccaaaagagtaaatcaaaataatataactgtacaccaccaaccccacctcatgcagcattgttatgatttaccctccacgtggggcaggggcaatgccagaggtcttcccttggccttacccacaatgggggctcagagaaatgtgtgtggaactcaggtgatctacctggctgcttcttggtcttcctcactccattgtaactgtgaatggccataggtaccaactctggtgtgagtagagtatgatgaccagaggctgagaccactctagaatgagggtttgggtcatatcaccaggtgagtcaccaagaccttcggagctgctagttagagtgagagggatctagaatggagagttgggatgggagatgatgagtaatacataggctcctgaaaagccatggaaggggctgtaattaattccatcagggtccctcttctaagcttcctttcaggaggggaggcccatgggaactgcagggaagcagattcatgaacttgtacaatatgtcatgcaaacttggactgtggcagccaggaatgcacatcgctcaaatgttccttcaagacagaatctagtgggaagaatataaagagttgctgtatcttgcaatatgctccagcattcatgccaaggctaccctccccccaggctgctcccagtcaacgacttagcttgcaaaggtcctggaggccgatggccttcccagtgcagggttcctctaatgacaactctttgctctcagacttcccatcagcccagctaaaaccttgtcactgtgagactcttcctagccaatcctccttccttcccccttttcatttacaggtatcagactttcccatttctttttcctgttccttttatcctttatagttatttccctccaatacatcttttgcacttccaatattgtcttggcatctgcttctgaagggcctgtgccggttggtgtacacaatcatttcttctacttataaagtaattattgtaaactgctaaggtttataaagcaaataaaaatggaactcatgacagcataatcattagtgtaattgttggataatattgtaaaaatattataatattatattacttatgttcttacctggattttatttgtgtcaatcaagtgctgtgccatcgattttaggataattgcaaagaagaaccaggaatgctgttgggaaaaaaaaggcaacgagacatttattatcctatggcaaaataatgataattttttctttgcaatatgtaatactataacattgttatgttaaaatgtattctttgaaactaaatgaattagagcagtaaaatattctctattatagtgggatgatttttatctcaatcctctcaaaaaatgtttaaactaaaacaagttacaagtttatttggcatgactgactaagcagttgttttacaaaatatttattcaagggatgttctagttgtttcacctagttaaacaaaactaaacaaacttttatttatttatttatttatttatttattttttgagacagtctcactctgttgccaggctggagtgcagtggtgcaatcacagctcactgcagtcttgaactctccggctcaggtgattctcccacctcagtctcccggacagctgcgactacagatgtggtcaccatgcccagctaactttttgtgttttttcgtagagacagggttttaccatggtgcccaggctggtcttgaactcctgggcttaggtgatcctcccgcctcagcctcccaaagtcctgggattacagttgagagccaccaagcctgacctaaacaaactttttattgtaccaagctcacccctcaaatttcaaaggttagaggtaagggtgaaaatggaaggtcatatgtctagatatctagaagttggaagtcaagctgaaaatgtgttaaataaaatatgtttgatcctcctacctcgagaaacaaaacttcataacaccttggaatgctgccccagggtgtgaggtcctggggggcacagggcctggcctgccccttttcttctcgcccaaggctccgtcctgccccttgaggggcctggtgcgcatgtgttaaatactttaaaaaacaaagcttcaaaacttatgtcacctaaataactcaatctcaaaattatctgctcatgccagattttgtcatgaaataaatgcaggcccaatgataagagcagtacacacctgttcctacttagggctttgcagaggtagggccttgtacgcctgagctcttttggaaactgtccagcctgcacatctgagtgctgtccacaacctggccctcctccctgccgcaaatagctccttaatggggtctagggttgcactcaggcatcaagacctgtcctctggaggtcctggagggcttgggacagagattgaagcaggcctggaaatccacctataggaccttgagcaagagggtcttggggttccttacaggtctagaaggggaggtaggggctcctggtgggcttgttctcttagctcctcttaaaccttggcctgtgaggacaggtgcagtatgagaagaacaaagctcatcccaggatgggcacccttctttcttgggcctaagggtgacacttatctcagctacaaaaagtcatattgtatatgtatagtttcaagaacgcaccccttgcatcctctctgcttcctactccttccaccacagataacagttttaaattttgtgctaatcattcctttgctttacttcacaattttgctacgaatacttatacaatgaagggatatttagttcatctggccactgaacttcataagaatggaactatcctctatgtattcttctgagattgcctttttcattcaacaaattctgttctgtggttcgtttatgttgaagcacgtagctggggggatcacatatggtcaccacatgacatatataatcaccatgtacttatctgctctactgtcaatgggcatttggattatatcctgttttaagtcatacaaacaatgctgcgataaacttttgacaagacagtcctaattccagaagactgactcagataaaaaagagaagggattgatattctacaaaggcagctatggcttaatgaagtggtcacttcttagtaagaagaaatggaaatggctaccaatactattctagcactccaatagcattctaatggctattagaagtgaaacatgttgttaggaatatgaatgaatcccaggcacactgctgcaatcctctttccctaatcttgtccaaaatattttgagccatcgtgtcaagtgttccaacatttgtctcttaattcaacagactcctacccctctccatcccttagcactctggcctgcctccactattttccttgaaaccaccagcactaatgaaattgagcttttgcctgttcacgtctgatgacagatgaagcctcaactcctctactgccctctccacatattcccttatatatctgcacattccactgcttccaatctcctgaaacccacccaccccaccttccagagcacatggtccatcgttagcacaatctcttgaagatgcaattcttctccgagcattcccttcactccatattttaactgagcagtgactctccccagaggatcctgcttctctgatagcccctcaagtggttgtggtctccatttttatcccactgtagtcgattctcaacacagcaatcagagggatccttttaaaccaaggtcagcttggtttaaaacattactcctctgtgcaaaaccctccaacgacacaactcccagttctgctctgagtgggaacgcctggcctatgctaactcccaagcctccagtggcttccatgacttcatcgtccatcttttttttttctttctgctcacttggctccagccacagtgtcctccctgtctcctgccacagtgtcctccctgtctcctgcagacacaccagccatgctgctgcctgatgacttcacacaggtctttccctctgagcatccccatggccagcaccctcttcgccttcaaattttttttttttttgctcaagaattacctcctccatcagatatcctgaccattctatttaaaacttcaaatctcccctgcaccttcagcactcacaatgcccaattcttacctgttctacaatttttctaatgcatcttcttttctaacatacaatatctatctatgtatctctctctctctctctctctggtcttgttgcccaggctggagtgcaatggcatgatctcggctcactgcaacctctgcctcccgggttcaagcgattcccctgcctctgcctcctgagtagctgggattacaggcatctgtcaccactcctggctaattttgtttttgtatttttagtagagatggggtttcaccatgttggccaggctggtcttgaactcctgacttcaggtgatctgcccatctcagcctcctaaaatgctgggattacagaggtgagccactgcacctggcccactctacttttttctatgttgtctcgatatagatctcttttgcttagtatctttatatgctaagtttcaatatgaaccttatgctggaaactgcaagagaaaaagtctatgaaaatccatgactcctatcattttccaggagtaagcgtgacccatgcctagtactcacagttaaaggaccatctttaaattcttacctttaggacatgctttactgttgttgagtcatttgatttcaaaagaccagtcacatttttagccagttcctcatgtacagtcctctccttgcatgccctggtcttgaacacgaactgaagaaaatccaaaaagtgaataaagttaaatactttgaaaaatgaagcttcaaaaactatgtcatgtgaataacttatgtctctaaattatctgctcatgccagattttgccatgagataaatgcaggcccaatgataagagcagtacacacctgttcctatttagggctttgcagaagtagggccttgctcacctaagctctccttgaaactctttgtagaaatcaagagaaagagccagagagccatttagcacgttcaaggaaacatggagggctttgacccacctacttaggacacattccccttctccttcctccactggtaacaggtggcatggtagcaattcttcatcctgaaagggtagagcacccactcaaatagccaagtggggaagccagtgccttccagatgccagtacgtgagctccccacaagcccagggtctatgatcccatgcttagacacactatcaaggcgttcatgaacattggccatcagtaagataacaaatgctgcatacttattttttttcctcaaaaaattggttttggcatgcaccactgagggcacataatggctagttttcagtatttcttcatctcttaagaatatcagtatcaatttatgcacatacataaagttcaaatataaaatgcttattactgaattataatatttcacttatgaattgggtttgcctcgtggaaggacatttcttcataattttcacaattcggatttcaccgtaattgagagtgaaggcaggaaagagaaggaatggcttaatgtagaggcacattagcttttggatctgtaactgtttctttaaactttgtagcacattggcacctaacttgtcatggtgggatttgacttctccaagctcatctcaaaggagaaagatgaagttaatggatgcatgaaactagataaaatcaagagtaatacaatttttccctctcatgggttatacctcagatgtgagtaacgtcatcatcaatgagctcatgccatgcacagttatttagcctgaagggcatttaaactggcactgaaatattcttattttaaaattttgactgtaacccatcagtgctacaaatcactgttaaccatggcatttaattagactggctttagacacgcatctttgaaaaagacacggtgtatgtgtgcattttgcatattgtagacgaagtgagttagcagcatttagcaccactgaacttgaaatggtgtttagataacttctaaataaatacaaattgtattgaatatcacatctttggaggacattcaagcacgcactgtaacaagagtccaatcacaggatgatagaactgaatgttcctttggtcatttcatctcatgtcacaggagaaaactgaggttcagagaggctgactgcttaagtctagaattgactagaatctagtctcttacttgccagcttagtgttctttcccgagtaaaatgcgagttgattacatttattaggaggtatttgttttagatatgttaaaatttattataaaattgttatcagcctaaaattccacataggtgtatttttggatttgaatcacttaaagcaagctaagtagataatctcctgtattataaagtgagatggtcttgttgggtatttcagataccctggttaaaaataaaggtcacgccaggatgcatttctaatgcatctctccaggagcgtcaccggtagaaagtctgagatttgaggtattcacaaagagctagccttggtaatcacaaaaatagtcacaacaccggaggggtcttaatgtaattttcaatgatcccactgacatgaggaaaataatatgtgttgaaatggagatgcctgtgtgtaagatggatcagtaactttttttctctttctcagtccctttaaggattgaaatgaaacattcgggtaatgaagcattgagagggtgaaagttctccaggtgattctgttgaatggtaaattcatcgatactctataaaactaagctatgaccctatcttagggagcaaactaaaaaggcttgtgtaggtggaactggctttttgcagttgagatgtggatcttattgggtaaaattatacaatagagaaattattgtgaaataactatttttggcatatagcctatgtttaaaaagggcacatactcatgctttggcatttgggaagacaactaacatttctggcagatagaaaacatatggatataaaaactgtaatgaaaaaaatttccttacagatggtatctcagaggggttcactccagaatgcaatttctggttacttccttttatgggagtgtggaattttttttttttttttgagatggagtcttgctctgttgcccaggctggagtgcagtggcacaatcttggctcactgcaagctctgcctcccgggttcacgccattctgcagcctcagcctcccaagtagctgggactacaggcgcccaccaccacgcctggctaattttttgtatttttagtagagacagggtttcactgtgttagccaggatggtctcaatctcctgacctcgtgatccgcccgcctcggcctcccaaagtgcttggattacaggcgtgagccaccacgc

SEQ ID NO: 1687 - DNA, 202 bp, Homo sapiens
ttctttttttttgagacggagtcttgctctttcacccaggctggagtgcagtggtgcaatctcagctcactgcaagctccgcctcctgggttcatgccattctcctgcctcagcctcccgagtagctgggactacaggcacccaccaccacgcccggctaattttttgtaatttttttttttttttttttagtagagttggg

SEQ ID NO: 1688 - DNA, 17646 bp, Homo sapiens
gtttgtaaatattatctctgtggtttttgtcctgcggaattgttcacaaatacacgttctgatcttggtaagtgaattttctgtgtaacttttatcaaatttatgatatttaaaatgttgaataggagtggtgaaaggaaaaaaactgattataattctgtgaagttttttcttaaagatttgctaataagtaatttcttacttggtttagatatttgaatgtattaataaatgtcagtctgattaaacatggtggcttaattaaacatacatgtctatttccactccctcccaaaactccacttaaatgaaaaaaattttaaaaagatgtatttggaagaggagataacattagagatgtcagcaaatttttggaagatgacaagtggatggaggagtagcagcaaacgcaacagagcagagcaacctgtaccctaaaagcctgcagaaggggatactaaacagaagcgagtgtttgatcagcagaaccctggacaggctcaggatttggaggcaccaggtaccacagaaggcagggttgagtcatggggctgaaaatgagagagattagtctgtagtctagttcagggtttctcaaccttgacattgttgacattttgagccagttttggagggggcttttcatgcattgtgggatgtttagcaacatctctggcctttacccactagataaccagtagcaccccctgttgtgacaccccaaaatgtcttcagacattgccagatgtcccccaggatgcaaaattgccactagtgtaggtggtcctgtgcatctgttgatcttactctcctccccatagaccccaggagaagagagggttattttctggagaaattggactagagagactagtttatctgaaccacaaaatagaaaaaaataattgactatttcctcaattctctcaaggatggtacataaccaggatcattctggatacataaaagaagtcaattcattatgtacaatctttgccttagagcattaggagcatattaaggcaggaccagtctagatcttgagatttcagacacagcaggggcagtagtaagttaaaaaaagaatgtaaaacagagtaaatgaatctatatttttattggtggggctctcctctgccctgttcctagaaggatacagccagatgtttttccccaggcagaagaaaagaggattcttctctagagaaagtgaacagttcctgagaagtgatctctgcaggtactgacccttggggaatctcttaaaagaaagtcttactgcctgattttcctatgataaagcccattcatgagctgacaaaccctgcctaatccctactaacttccagtcagattttggaagtgtctttttaaaaaattagttgcttgccaaggaccaccagccagacgttcgaagaaagccttcaacacaagagattaacaaaaccaacagagaaagaagaatttagtggaattggagataatggggaaagcagaagagagattcttcaaaatcttaagaaatttagtatcttcagagacatatgagaagacactatattcttcagcaataatacgatgccataaagagggaacttgtggaaaaagtgaaaaacattttctgaaaaacagctcttagaaattaaaactgaagaaatagaactaaaatcaccagaaagatttgaaaataaaattaaggaaatttactggaatattgggcagtacgacagaaggatttttaaaaaacttagtccaggaactgtactaccagcttaatagttgtggacagaataaaagcagagggaattgcttaagaaaaaaaatttgcagtactaaaggacattcatctttaggttgagcaggtcctacaagtgatcaggacagtgaatgaaaaagatccatacctaggcatacccctgtgaaattttagaacacgggggtggtgggggtgggtgtaggtcacagaattatgaatcagaatggcctaagactggtcagtaacaacgggggaagttgaagacattggagaaacatcctcagggtgctgagtgaaaatgtgtctgccggagggggaaaaagacattttcagatatacagggtctcaactgatttatctcccacgggccttttctcaggaaactccaccaaaacatgtccataaaccgagaaagaggaaagaaaaaacaagagatccagtaattctcatctactacagagcagaaaaggaattcatcaggacaataattctatagtgagcttagaaaataagtatcccagattgaagtaaggcagaaggcccatggaagaaaatgaaactgatgatgtgatatattttgagtcatatgtgaaattagtattgagatagtttctatagctgagtttgaagtgtttgagaagaatttgaaaatatagagaaaaaactaggctcacacctgtaatcccagcacttttggaggcaaaggagggcagatcactcgaggtgaggagttcaagaacagcttgcccaacagggtgaaatcctgtctctactaaaaatacaaaaaaattacgcaggcatggtggtgggtgcctgtaatcctagctccttggaaggttgaggcaggagaatcccttgaacctggtgggcagaagttgcggtgagccaaaattgcgccgctgcactccggcctgggcgacagagcaagactctatctcaaaaaaaacaaaacaacaacaacaacaacagaaaacatcagaagtgtctcataatgagcctttgtttggcctgacagtgaatagtacttgcataatataagcaccaagtgtttatttatccaaaaattttgatgtctaggattgataaatagcaaaataagcatagaattttaaaaggtggaggtaaattcgggaagaaatagagaagagttaagataattgctttttagaggtgggaagaagtaggggttaggtactagtctagtgctatttgactttatatacagatttgaaaataataaagtcggcaatggttcagttcagtggtctgtccccatcagttttctttagtggcaataaggaacagtttcctttcaccttccctccttttctccctccctcctttacttctcttttaaccatatatggttgctgtccattatattgactttgaagactgagcagatcaattttatatcctatttggttatgatgcttcatgatttagtaggatcagtttagatgtctacaaactactcagtgataaagtgaatcctttttctttttaaaaagaaaaataactctttttttttggcaagaaaaggttgctaataatcacagataatttatacaattatattttttcccccaggtccgtgtgaaaaaattcatgatgaaaatctacgaaaacagtaagttattttgcttgtcatttccacccccccagttattagttggtttaagtgggacaagggttgaggaataattgcaattaaatgtaaaatgagtgtctgagagaagtccagtcagtggctggggatagtaagaaagttctatagcttcagtaatgatactgatagctaccacatgagtgcaccctgtatgtcagactttttttttctgtagcccatttgctgttttttttaaatgagcctcactgtgtcgctcaggctggagtgcagtggcatgatctcagcttactgcaacctccgcctcccaggttcaagggattctcctgcctcaaactcccgagtagttgggattacaggtgcccaccaccatgcctgactaatattttgtatttttagtagagacagggtttcaccatgttggccaggctggtctcaaactgctgacctcaagtgatccacccacctcggcctcccaaagtgctgggattacaggcgtgagccaccatgcccagccccgattttatccatgagacttgtcctaggtccagggtcatagatccagtacagtggtaaagctagtggttaaacccctgtgtaaagctctatgatgaggggcaatcagaaagtcacttcaaatacacctggtttaccctgcagcctaaatggaatagtcgttgaggctagttaagatagaatatttgagttgtaatggctgaagatttggaaatgagtacttgtttattttcatgttaccaggtatgagaagagctctcgtttcatgaaagttggctatgagagagattttttgcgatacttacagagcttacttgcagaagtagaacgtaggatcagacgaggccatgctcgtttggcattatctcaaaaccagcagtcttctggggtaagtgaagtcaattcagtctttgtaaacggtccttgttttctggagattcagagacctccctaatatttttgaaacttgtcttctgttcattactttgttctttaaaatgatatgaaacttatagggcattcattttttttccagtctttattagcaaacataacactgattttgctaaccataagatttttctttgtttttatttttcttgaggccaagatttttcccttaaatagtagtaactgacaatatgtgattgaccaacagaagttgaagataattgaattactatcctttcaattaagcattttaattattaaatagaaatattatgtatggtatgtgcaagtttgcatgtttatctttgttttcaacttgttggtaatacgttttattgtcttcaataggccgctggcccaacaggcaaaaatgaagaaaaaattcaggttctaacagacaaaattgatgtacttctgcaacaggtgagaattgtgtgcattaatgtcaggaagtaatgtgaaacagacatgtaaccagcaaaaatacaaggatgggccaggcatggtaactcatgtgtataatcccagcactttgggaggccgaggcgggaggattgcttgagccggagaatttgagaccagtctgggcaacaaagtgagacccagtctttacaaaaattagccaggtgcaatggcgtgtacctgtggtcccagctacacacgaggctgagttaggagaattgcttaagcctacaagggcgaggctgtagttagacgtgtctgtgccactgcactccagcttgggcaacagagtgagacctcgtcttgtgtgtgtgtgtgtgtgtacatgtacatatatatgtatctgaaaggacagcaaatatgaaaagacgctcaacactattagtcgttagggaaatacagattaaaactgcaatcaaatacctatttgacacctatgagaatagctaaaattaaactgatcataccagctattggcaaggatgtgagccagctggaactggggtataatattgcacaaccactttggaaaaaatagtctcatttttttctttcatattcctgtagatgatattggagtctgttttgttgtcgttgttactgtttttttgacagtcttgctttgtcacccatgctggagtgcagtggtgcgatctcagctcactgcaacctctgcctcccaggttcaaatgattctcctgcctcagcctcccgagtagctgggattacaggtgtgcgccaccatccccggctgattgttgtatttttaatagagatggggtttcaccgtgctggccaagctggtctcaaattcctgacctcaagtaatccgcccaccttggcttcccaaagtgttgagattacaggtgtaagccactgtgcctggccctggagtctcttaaaaagttaaaaatgtaccatatgccattctactcccaaatatttatccaagagaaatgaaaacatatgtctacacaaagatttacactccagtgttcatgagtgctatattcataatggcacaaaaaaaataaaacccagactggaatcaattaaaatacccatcagcaggtgagtggataattaaatcatgatgtatctatatggtggaatgcctgtcagtaataaaagggaattagctacatgagacaatatgggtggatcttaaaataattaggctgagtgaaagaagccggacaaaaaaggaatatagactctatgactctatataaaattttagaaaatgcatattaacctacagtgacagaaagcagatctgtggttgcctggggattgtgtttaggattcaggctggaggaggtactgaaaagagtaggtggctcacacctgtaatcccagcactttgggaggattgcttgagcccagcagttcaaaaccagcctgggcaacatagtgagacgctgtctttccttttttttaaaaaaaaaaacagagtctcacgtcatcatccaggctggagtgcagtggcacgatcttggctcactgcagcctcctcctcctgggttcaagcaattcttctgcctcagtctccccagtagctgggattacaggtgcccaccaccatgcctggctaattttttttttttatatttttagtagagatggggtttcaccatgttggccaggctggtcttgaattcctgacctcaggtgatctgcccaccttggcctcccaaagtgcttggattacaggcatgagccatcgcgtctggccgaaagtgcatttttcttaacacatcagttatactttattgaagtataaaaaaaatccaggataaattaaacccaaagaggcttttgtaaatgaaaccaaacaaaaaagatggaaaacaaccactaatgaaccatggggaaaaaagacaatagttgggtttgaaagaaatcttaactgtttttttcccctactcttctaagattgaagaattagggtctgaaggaaaagtagaagaagcccaggggatgatgaaattagttgagcaattaaaagaagagagagaactgctaaggtccacaacgtcggtgagtaaaccttatttcacattatctcatctgtctgttaacagttagtaggaactcatttttatttgagaacctttgaaaactgatgttccaaacttagagtcagcacaatttgtagcccacaaggtctgtggcatctactaagctctgcctttgtgcagtatgcaagcaactttatatagtacaagaaacaaatgggtgtggttgtatcccaataaaatgttagcaaaaggcctctctggcttgccaatcactgccttaaaccataaattttcatatgagcctggttttattttcatttttgttgtaataaattactcagtacatacttacatctttgttaaaaattaatacacccttaaatatctaattcttttaattggagaatagaatatacttgtttcagatactattgattgcagaatgtaattggtcattggttcctccatattgaataggatatgttcagattatagtcaatgtgcttagttccttaattagttttgtatatggacattattccttgaacctaagcaaggaatgtattcatactaaaataggtggctttctgaaaggtgatttaaattttgtaaggtaatgtgggtgttgaacattgaacagtgggtctcaacatttcttctggatgattcagtaagttagttgctgttaccttaaacatccctctctaaaagttgaccacttgtagtccaatattactgatttggggaaatggaaaagagcaattcacacacattagaaatcttttctaaatgttgagtactttcctgggatttgtttctcttcctcagatgttcttaaaataactgatttatcattttagacaattgaaagctttgctgcacaagaaaaacaaatggaagtttgtgaagtatgtggagcctttttaatagtaggagatgcccagtcccgggtagatgaccatttgatgggaaaacaacacatgggctatgccaaaattaaagctactgtagaagaattaaaagtaagtttttttgtttgttttgaggcagattcttgctctgtcacctagagtgcagtgacgcgatctcagctcactgccacctccacctcccaggtttaagcaattctcatgcctcagcctcctgagtagctgggagtacaggcatgtgccaccaggcctggctaatttttgtttgtttgtttgtttgtttatttttgagacagtctcgctttgttacccaggctgaagtacagtggcgtgatctcggctcaccgcaacctccacctctggggttcaagcaattctcatgcctcagcttcctgagtagctgggattacaggcacacactaccacgcccggctgatttttgtattttttttaatagagacggggttttttcctgttggccaggctggtcttgaactcctgcctcaggtgatccgtcctcctcagcctcccaaagtgctgagccactgcgctcggccagcgtaaatttcttctaaagatacattttagctattaaaaaaatctattttagctatagctacagcttttagctatcagtagctatagataaaaataactatattctaatatggcttaaatggagatatgaccctctcattgatattttcctatgtgtaattatttttgaagcattgtgagttctgtgaaattttgctatttattgaactatgaaagcacttgattttcttaactcttgagtgccagaaatttgggaagaatattcctgaggattagacaaataatgataccttgtgtatatacatggtgttggaatgtctacatttcccttaagggcatcaattccataagttggtctacagataacttcacattagttgaccattgtttaacaatgctttaaagttacatttgcataagaatccaacttgatttttctaggaaaagttaaggaaaagaaccgaagaacctgatcgtgatgagcgtctaaaaaaggagaagcaagaaagagaagaaagagaaaaagaacgggagagagaaagggaagaaagagaaaggaaaagacgaagggaagaggaagaaagagaaaaagaaagggctcgtgacagagaaagaagaaagagaagtcgttcacgaagtagacactcaagccgaacatcagacagaagatgcagcaggtctcgggaccacaaaaggtcacgaagtagagaaagaaggcggagcaggtatatataaaacaccctaagactgtccagctcataatgggtgtgcaataacaataataactactagtattattccttggaatggtacttgggaagctcttaagcatctttaagtgataggatgggttgcgagagcggaatcagtgaataaaatagttccatcttcggggcaacttctgtgccatttcccacctgtctaggaaatttcacccaacctttttacaaagttagagtacctgatggtctcttaagtgcttgtctcactgattccgagaaataaaatatgaaatcagccatactgttttaattataattacaaattgaagaagagtcttaaagagcacaacgataaccatcttagcactattggagatgaatttagaaagattttcaataatttttagttcttaagatttctaatgtaaatatgttttagagggtaagttttgcctagtcttgttaattaatagcatctactccaaggcctttacttattgtaatactggctgaagttgccttttggttttaaattattaagaagtagagatcgacgaagaagcagaagccatgatcgatcagaaagaaaacacagatctcgaagtcgggatcgaagaagatcaaaaagccgggatcgaaagtcatataagcacaggagcaaaagtcgggacagagaacaagatagaaaatccaaggagaaaggttagtttatatgagaattcagttcattaagaaacttttcacaccctaatcgccccactcacttttctccagacacaggcaaagatccatttcatacatactccttttcactttgaggaatgccattcagtaggagacaggcattctttccccctctcctacttagatttgtgaaaatgacagtttatctggtgttttcttagatgttaaaaacatctttcagttgataaacctgaaggtttttaatgtagcttcttttaagtgttatattacctttcggggttattaggtgtaggatttattatattaccttggttattggctccttttttttttacacactgcagtgtttcataatacgtcttataaagtgagtgtacattgttgcattaatcttcatttgtagcattcatttaagttagtaattaacatctaagtacctagaagttgaattgcttacatgtgtcttacccacgttttcaatgggatcaacatgctctttcccctttactttttcttttttctttttctttttttttttttttggtgtggcatcccagtagctgatttactgtgctgttggcactattaatggactttttaatttgtgtggcatgttttcacaagaatattctcatctaacttagcctttattggaagataattctgttaaccaccagggtctcctttctgagtttcatgttcttctattttgtattttttatataaaagatataaaatatcttttattttgtattgaatgagctgttgtgctttgcatggttttaggaatgagagaaggggcctatttctgattttctcagctctccttgtttcatttcattctacctgtctccatgtttaatcaccagcataatatatgtgctactattaaggtttattatactagtcttttgtgtgttgtttgtttattatatcctttaatagaactgtcctggttttttgttttcgtttttcctctagactcagctagaactagcagcacaaaccatggacatattttttggtctctgcttttattttcttaaaataagcacacactctttttctgaaatatttaacatctattggcttttactgtaatgtgagaaagtgttgaaaacttttgtcttcctgccagatgtgctagtgtttgccattcaagttgagaacttgcttctgattcaaaaggcagttgctacaaagggttaactgatttaacattagatttaagaatgttttacctaatctttttgcaagactttctgtgtaatgtctttttgggttgagaggtcaactcttaagagccaggtatgactgtcaggtcaaattaataatatttgttttgagaaagtttttagttttacatttcctattgttagctttagttgctctattctgtgttatcatttgtgccacttaaaattgttgggttggttcttagggataaaagctagctagccttcataactacttgaagtcaaagttgagtagtaaatgacactggcctgactaaaaacaggcatatttgtgtaatttctggatagagcaaaaagatgtccagagttgcttacctttaatcctaaaattgtaatgatgatgacatgaaatttagtgaaacttttttttttttccagacagggtctcagtgtcacccaggctgagtgcagtggcacgatcacagctcactgcagcctctacctccccggcccaggtgatcctcccacctcagcctcctgggtggctgggactgtaggtgcatactaccatgcttggctaattttttttttttttttgggggggtagagatggggttttgccatgttgtccagtgtgatctcgatctcctgggttcaagcaatcctcctgcctcagtctcctaaagtgctggggttataggtgtaagccaccatgcctggcccctagtaaaacttttcgttaagcggaataagctgagttacgtttagattagcaacagacagggattttccatgtgagacttggtgcaaagagagaagttactaagaaaactgtatcaggcttgtctcccatgattgggtatgctatgatagagttaaacattggaatctcttttagaagtgatataatttattggcattttgaaaatgctatgtaaaaataaattaattaaaatcagtgtgcagatgagtgaatttaaaaaatgtaaaaaaaaaaatacagaaaagaaactaccatgtagccatctaggcactcttataaatgactgaagatctggactttgggaccaggtgtgagccacagtgggcatttattaatggcaaatgagaaaaagcaagtttattactccaggtgctatgatagaagcagtttatcttactccacaaatgaaaagtggtttctcacacaaagctgtcagcaaccagtgtaaggtgctctctttgtcaagagagtttccttttttcatccatagccctaaaatccaccacaaattgtggatgtccttaggactattaagatctaccatatttacatagggcagaagataagattattggactgactactagtcctctacgggacaacaagacgactcttcctcattgaagctacctgtgcaccggagaagcccataaggcacaaagggaggactttcccacaaggtcagttagagcccactgtcctggcacagttctcacaagtggacagacagacatgaagcaagtcttgcgcttaactacttggacattgctttgtgtattatgcaagtgttacggactaaatatgctcttttacataagatcttcagttctctgagtgggtgcccctcccataccatgttttgtttttcattaccatctctttcctagatatttggtgttacgtcttcataactgtgcagaaactatgtagagggttctgtttctcttaaaatgtctttttgtctaattaactactctgccagaccagctattcttagtaaggggaaaagtaatttttccagaaagtttctagttggctttaacattttctgtagaaattttttgttgggggaatacttggaactgaaaaggctagactatgcttgctctggtgtactacttttacctctagtctgaggtcttacccatccaaagaatagtagaggaaaaagttgtttacctttttcattcttcatttgcagctgagttgaattttaatttctctttttggaaaaacaactctcagatggcatatatattacttttcttagcaaagcacaaaagttcagttgcttagattgggatttaagatccattttctttgattaggcttatccttcttggatattcaaatatatataaaaataatgttttgcattgaaaaatatgtagttgtagtttttaaaacatgcctgttataaacattcaactttttttcaccttttggggtctccatttttacccttctaacttaataattgaacctcatgtgaacatagttttgtatgctgtcttttatacctttcccagtgctttttgatgttttttacccacaatgaaatttacttaaatattatattctgcaatgtgcttaatagcttctcaccaattgagagaatttacccactattttaccttttgcttccttgaattccccttcctgccttctctctcatatattacaaattttatccctttggtaaattcaccaaaccgttgcttgcagtctgtgggaaatgattgtctctcatctctcagttgtttcactttttttcaaaatcatgtctttattgtattttactttaaaatccatggtcaatgtcttcttttatggcagaaaagaggggatctgatgataaaaaaagtagtgtgaagtccggtagtcgagaaaagcagagtgaagacacaaacactgaatcgaaggaaagtgatactaagaatgaggtcaatgggaccagtgaagacattaaatctgaaggtgacactcagtccaattaaaactgatctgataagacctcagatcagacagaggtaagtgtattgtttctcactttgattagggctttttgttactgtttgacagtgcagcgtaagtatgcacagatgaagatggaactaagccgagtaagaagacatacaaaagcctcttctgaaggaaaagacagtgtagtcctgcaaaacattttgaggtacattgttttgtctcagctattttgtagcagactcgtgcccccattagtgtgcctctttggaaattatcgcccacatttgtaatatagtcgccattgaaaagttaattatcctttttttagggattttgatgtcatttcttttttttttttaataaaaaggttgaactgtttttttttttctttttggtattaagtccatcttgtgttggtacattggcagagacatatgctttaaaaacttaaatatttcggaggcacatgttggactactttgttttaattaaactgctagtatttctttgtcaaggatgtttctagttttttgctttattgccttgcattctaatgcagtttgttctgtaactcgagagccagtagcattggattgatggaagtgtagggtttatgaattattgcagctgactaccatacctcacacagcgttggtgttgtgagcggcccatgaaaagccaaattaaaaatcaaggattcagtcaaactaagcaggtactcatgccaggtactcctttctctacccacatccatgtttgaatgctattgcctgtgatctttacgcttaactgttgtgtatcttttttgttctttacaagaagtgcagaggggttttttgtgtattgcgtgaaaacttataaaacaaatgttaacagaatggaattttttttcaactgtatgtagggctgcagtggtggccagaattagatatctttaaagaattttaaatacaataaacacttcatattattcgccttgttacactcaatgcaattctcaagtctataagaggtatgtgcttaatatttcctactgtgtaggagaatttgcagtcagccataggtatgtaggaatagtcactcactggctgatacatttaaagcagcagtgtgaatagcaaggacagacaccttcaatttgtgaaatcaaagaactgatgcactatatagaacgaatttgggtttttaaagaaatattaaaagttaggtactgtaagtgttcttaaaacctgtaaacttcattctgtgggctagtggtgtgggacaaaatattcctaatgaaaggaagtaccaattagttgatttgttggtggcattccccttttgggaaagcaatgtaaggttatgtctgtgtatgtcattcacacttaggcaagcatacacaggcacatggctttaagaaccacactgatgccttgataattaaaaagaatacaagcattccatgtacacatgttaattagcagttagtgactgggccaacactttctcataaaaattggccttttacatgttgtctaattatcatttttccccaaattttgcgttgtaggactactgttcgaagatttttggaagaatactgagaacggcataaagtgaagatcgacatttaaaaaatgaggtgaaagaaagctatagtggcatagaaaaagtataaagctcagttagtttttttattattattattattaaaagttaattcaggactgatgtgacctaccagatttcagaacatgtgttaatagtatatatgccactgaaaacttaggtcctgtatcatacttttttctttaagactttttaagaaatattacttaaacatgtggcttgctcagtgtttaattgcaagttttcaatcttggactttgaaaacaggattaaacgttagtattcgtgtgaatcagactaagtgggatttcatttttacaactctgctctacttagcctttggatttagaagtaaaaataaagtatctctgactttctgttacaaagttgattgtctctgtcattgaaaagttttagtattaatctttttctaataaagttattgactctgaactagtcccctgttttaaatacaagagttacactattactagaggtgttggtgtacagttttatctgatttgttctgtttaagactaatttttatagactttctaatgttttaaataatggtgcttcaattttaggtggttatgaataaatttgaattttgcttttaatagcaaagatgtgcagtgaactagaatatatttttacatccctgagagattcatttagtagaaaattccaagtatcctgacaagcactctttagctggctagctatgggatgatgtagaaaagcattcaagagctagtttttgttaagtcctgtatcaagattaacccagctgtgtcagtttataaatgtatttgtgtatagggtgtgtagtatatatggcaagggttttttccccccacttaagtgattatttttgtgtcacatctaggaaaaccggcagcatgtttctatctatagccagcttcttcgactgtataaaagtattctctccagctacgtatatacacacatacatatatatcatagcaattccttgtggtttataacttgcaaatactgctatcagtttataggtaaagaaacagtgtgttaaatgacttatccagggagggtcctgtggcttcatgtttatggagttgctaggtctctgcctcatggtccagtgcctgttaagccactgtgttcattctaataggcataatgaattgttaaagaatttactaaaatctcttccaccaaactttgaaaaataatgaagccgcccccactttagaggctctgtatgaaaaaatgctgtggagacagagccctcctggctccctagctgatcctggagatgcagcaatagatgaatgggttatctctgaatttgtaagagataattcacatgaggattaagataaaatgggaagtaaaatctaacaaacacaaagatagctcccaggcactgctttgtgtagtttgacagcattgtggttgtagcagcaaaggacttaaagtgatagtttttaaaccatattctgtccctaagtaataaaaaatctaggaagttactaaaataccagatttgttctgctctgcctcatctagaatcaacgtctaactaacttaaatgaagtataataaatgagttcatatgaaaaggcttcctctatggacacttagatatattgtaactattgaagttacctgggatgtgggggtggtgggaggaggacctgcctccccaggacatctatgactaaggcctggctttagttatggagagagacgtagaagttgaattttacacccaaaattgatgtgactgaagaggaactgattgttgctaaccagctcacaagaatccagtattgagaccagttcactagaagaaacaaacatttctgccatgcagaccaaaaagttattagttggtgaatatgtattttctctttggaaggtctttaaggggagcaaaccagttttaatcaatcagattgcttggtaagtttggaatctgcaatcagttggtcttaaaaaaaaaaaaactttattttggaaatttaaagacatacacaaaagaggaacaatataattaacctctgttaactcatcaccaacaagactcatgaccacttttatacttcatgagtgattgtatttgtatccactgttttctattattttcgagcaagtctcagacacaccatttaatctgtaaataattcagcatgtatctctaaaagacaaagacctcttaaataacagttcattagtataaaacaaattgggtaaacttttgttggtcatcaaactatattagcactggtccaatagtttaattttcattgagcctttcaagaggaccgaccagtctgctgctcaagacatcctctcctctgga

SEQ ID NO: 1689 - DNA, 1466 bp, Homo sapiens
attctgtgggatgggacttcatgcaggattggttttcaagtttgatttcctgagggattttttagttgtttgtgaaagaaccccaggtctacttttgaaattttgtattataattgtaatgttgcccatggttaaaaaaaaaaagtgttcagtgatctatgtctcctactactcctatttctctgtttttcctctgcaggagcttgctgctgttaacagttattcttccaagttgttttctttgtggggagatgggaggtgggaggaaatataaacatatatgtatagatctttcaaaatatatgacggtatacccgtatgttctgagtcttgctgtttttacctggtaatatttagaaacatttattttgagataaaggagagcacttttaagttgaacctgtagttttaaaaagtacatttcaagtaagccaaagcagagaagtaaatgtatttttcattgttgtatcagaattttgaatttactattttaaaaattcaagagttttgtagctgatctatttcttcccctcagccatcccaaataggtcatttgtcaacagatttaagaatgtttagaaacaacaactttgggaaacgggaaacaatttggtataagtgggtgtgccataacctctctcgtagccattcattcccggatacataccctagagaaactcttacacatgcgtaccaggggatggatttaagcatttgtgtgtaataggaagaaaagaagaaaaaacccgggaagatcccaagtgtccaccaacagtgtgttggataaatactgtggtatattccaacagtggaattccacagaagtgaaactgaactgcagctgtgtatgtgaacatggacaaaactcaacaatagaaggatcaaaaaaagcaagtcacagaagaatacatcactatggttccatttcaatgaaagtcaaaaacaggctgtcaaatacatgataaaaggaaacgattaagacaaaatttaatgttagccgttttgatggagggagaggtgatcatgagggcacaggggtcttcagaagaactggtgagggtctgtttctgaagcctgtgggcatttccttttttaatctgtatgtttatgtgcttttgtatgtatgatatttcttaataaaatttaaaaagaagaatgggaaaaaagtcttggtgtaggtagttactaatatataagctgtagtgtatttcgtaaaattaaccatcagtcagtgacaaatttaaagatgctgtttcttgagtgcccaatttaaggttttattttgtttgagacagggtctctgtcttgtcacccaggctggagtgcagtggcacgagctcagctcactgcatctttcgcctcctgggttcaagccattctcgtgcctcagcctcccaagtagctgggattacagcttcgcaccaccacacctggctcatttttttgtatttttagtagagtgtttc

SEQ ID NO: 1690 - DNA, 3291 bp, Homo sapiens
tttttttttttttttttttttattaaatggtattgcttttgtttgcaggtctttttgtttttgttttgtttttgaggctgactgactgtcctagttgttgtgtgtttgtaatttttccacatcttattttgagcagctttgggtggtaaagttattgtttacaaattgaagcaactgattctagtggaacaaatgaaaaagaaacagtcaagcacacaatagtgcaaagaacgttcctttgtagatccgcaacttaaggattttgttcctcataaatggcatagttgaaagagcttatacactgcttacccagccaaatgctttgctttgaagtattgggttctgtgaaaatattgagcattgtacttaccttatctaggctgtgaaactgtcctacataccagagaatcataaaaacaaaaacctcactggcagcaagctgccgaataacaacagagtctagaggacatatttgtgggctgcacagatattttaggaatttcagaaattagaacaggagccaaaatgatttacattggcgttggcactgattcctttaaatggtctgggaaagggggttgggaagaggatggagctcaactggccagaagaggagcagctgcagtcctgatagcttctctagcctcggtcttttgagtgataagtagtcatgttgttttcatccagttggtttcttgtcattcccaagaagaatctcccaggccacatctttggggataactgacatactggattagccttttcaaaagaaaagtcatcctatttggttttatggggtgtgagttttgtgtgtacacacacagaaacatgtaaggtggtttgggtcatgtttttaaccacctggcaatacagtccactttctggtttcttttattgtgggaagtaaatggtcaagctgctcaggcagtgaaaagatgtggagaatgtccgttgtcattcttgccactgtattccatttgctaccgagatataacattaaggtggacacattttctaactgtattaattaaaagtcaatggatacagagagtggattttctccccaagtcccatccctgctgaagaccgcttggatgaactccccaacccactgtgcccctcccgcaacactaccagtagactttagaaccatagttaactaagtcttttacctctgagatacttaattctgggaaaattggtgacaattttcaacttctaaataggtaactcgactgcaaaataatcaaaactgataacaatgaaactgcggctcttaaacaaagccatgcatgccgtgcatttgtattgaaatgtctccatgatatgaagccaaatattcaatgtaacatacttaatatccaaaggtggaaacaaaagaatgtagagatccagtgttaagagttccatttgcttcaattaattatttaccttcctgtggaataatatatatatatatatttaatagaaccatagatagactagtagaatttagattataaatgtgtgagtgcagattatcctgctattgcacaagctagaggggggaaaaatctcaattccagctggcaagatgctagccaggacacatataagaaagttgcactagattgaatggtcacagaatcggaggacatggaagaaaaaggaaacttcggtggttctgcagcagacatgggctaggtcatatgtggtttctatgagttcgtgtctcaaaaaaaaaaggagggggggcatctgtccccggtggagctcacctatttggaatatggggcatttgttttttccactgcaatgatttcagtctggtttcatcatgttggaattcgatcacaccattttcaaacaatgttaacatagtccagcttttgtttttctcatctcttctgagaggagactcactgtttctgtctgaggaagctcataccctcggcaaaacatcaggacaaataaagagaaatgggggtacgcattcccaacagaagcagtgtgttatttgttttaaaactctgaacagagatcttggaaatctttcaaaaagaccattgaattcttcattggctgagaacgacgttttaaaatgtcttaaataaggctttgtttgcattgtttgagttcaaggggccttattattgaatggaattgcacaagcctttctttgtgcaatcaaaccattgttattggtagttctgtaaaggaaactgtggaatcgaattggcagtggagtcataaatctatttactgagtgtggcttccaagaaatgttgcaattcaaaatgcactaagtctgtgatttattggagatttggagattctaaataatatttttaaaaaacttccatgcaacttctggtttaatgtttggcaactccacatgataaaaaaataaaaacagcccaaccgagtttcggaattaagtattcttctagtaagtgattcaaacttgtaatatttgccacaggactgacttatttatttactagctagaagctcttaagttcacttgtttatcagggcatatacagaagggtttgttaaaactcgatgttaactttacaactttctgacctggtgcatgaattctcaagtactgtatttcactgtgttggtgtgtctgatggaaatttcgaggtggtcccacaaaaatattttatgtagtgtgccttcaaagagaaccatttatttctcttcacttatcgtcccacaaagtcacatttggtggtggtcagccaagtcgcatctggtctagttttactcttgtcccaattttaaagagaaatgggaatgagtttgccctggtgagacccataccattgcaatgattatcttgagcacttaaagtccagtgttggctgttagtgtatttgatattctgcctgtctcctcatggttgaaatatgtctgaagaatagcagcataatctcttggctgtttatacttttttaaactttcctgtgttgtaaatattgtatacttttggtgattccagctatgtaacctctatgctctgtaaggtgattatttgtatatagcaacatggcccagtgatattatatagtttcccaatggagaggttattgagtaacctttgcattagtttaaacactaccagaagaatgctgagccaactataaacactcaattttgtatgttttccaaattgtacttattactgcttttgatactgtattacgtgccaatagtttcccaatcacatagcaggcaagagatattttgtactttttgatccactgtaatatttaataaaaaatgttactatctgtttccttt

SEQ ID NO: 1691 - DNA, 3291 bp, Homo sapiens; identical to SEQ ID NO: 1690

SEQ ID NO: 1692 - DNA, 92 bp, Homo sapiens
ctcactgcaacctccgcctcccaggttcaagcgattctcctgcctcagcctcctgagtagctgggattacaggtgcgtgccaccacgcccag

SEQ ID NO: 1693 - DNA, 7852 bp, Homo sapiens
agattaatcctaccatatgaaagatttattaaaggagaagaagataagcccctgcctccaatcaaacctcggaaacaggagaacagttcacaggaaaatgagaacaaaacaaaagtatctggaaccaaacgcatcaaacatgaaatacctaaaagcaagaaagaaaaagaaaatgccccaaagccccaggatgcagcagaggtgagttgctttgctccatagaaatacctctggaagacatgtgctgcctcgaggtccttctggagccctgaatccacagctgtgtccctgcacagttggatggcttgatgaagaaaccaagaaatctaagcttcacagttccccacatagttccccagttcctgaaagcctttcagcttgctcatgagatgaaatccaatgcctagtattgaatgagatagcccaggaatagaatctagaaagatacaaacatcctgtagaaaactgatagcaaatgctcaggcttcaagagaaaagggtccagagccacactaacatcaaagaattttactgtgaaaacatggcttcttggccgctccacagcccgtctatctgaggtgctggtgcgactttaaaacatattttggggctggacatggtggctcgcgcctgtaatcctagcactctgggaggccaaggcaggtggattgcttgagcccaggaattcaagaagagcgtgggcaacatggtgagacccagtctctacaaacaaagctcacacctgtaatcccagcactttgggaggctgaggcgggcggatcacaaggtcaggagatggagaccatcctggctaacacggtgaaaccccgtctctactaaaaatacaaaaaattagccaggtgtggtggtgggcgcctgtagtcccggctacttgggaggccaaggcaggagaatggcatgaacctgggaggcagagcttgcagtgagctgagatcacgacagcctgggtgacagagcaagactccatctcaaaaaaaaaaaaaaaaaaaaaatatcaggcatggtggtgccccgctgtggtcccagctactcaagaggctgaggtgggaggataaccagagccctgggaggtaaagtctgcagtgagctgtgattataccactgcactcctgcctgggtgacagagtgaagccgtgtctcaaaaaaaatgctttggaggtccaggaaaggggaccttggaactgtggtgctgtatcctgcaagactctcctgaaaactttagagaagtgtttgtctcccataattgatttctgtgcaacagccatgggttgagaccaatttaagaaaatcttaagtgtggccgggcgcggtggctcacgcctgtaatcccagcattttgggaggccgaggcggtggatcacgaggtcaggagatcgagagcatcctggttaatacggtaaaaccccgtctttactaaaaatacaaaaaattagccaggcgtggtggtgggcacctgtagtcccagctactcaggaggctgaggcaggagaatggcgtgaacccaggaggcggagcttgcagtgagccgagatcaggcccctgcactccagcctgggtgacagagagagactctatctcaaaaaaaaaaaaaaaaaaaaggaaaaaagatcttaagtgcatattatttataggggaattttgaaatggttcctatgaaaccattattatttttcatattaacaggtagtttctgcactttttaagcccccaacagccttttggtagaagccattacccccagcatgtagccagtcatgtaggctgatctgggctccatttcaacatgaataataaaaaacgctgctgcccattaaaaaaaaaaaaaaactgagcagccacatttggagacagcatgttctaggattcaaccccagagggaattttgatgctgatattaaataccccctaaaaaatcaggtttataatgaacacataagaggctccataattaaacactggtttaaattgcacatgtacaacacgcaccaacctcccatctagacatcaacttacccagctgactcttacataagaaaatagtattgataccaagattagaaatttgtgggttttttgtttttattaggtttcataattattttaagctctagtaactaaaaagggggaggaggaagaagatgatgcagattttttttttttttgagacagagtctctctctgtctcccaggctagagtgcagtggtgcaatctcggttcattgcaacctccgcctcccaggttcaagcaattctcctgcctcagcctcccgagtagctaggactacaggcatgcaccaccacacccggttaatatttttgtatctttagtagagacagggtttcaccatgttggtcaggctggtcttgaactcctgacctcaaatgatcctcctgccttggcctcccaacgtgctgagattacaggtgtgagccaccgtccctggccagatgatgcagatttctcaacatctgcaagcttgcaacataaatggccaaaagcaaggaaattccaagtgcatgcttacattccatttttccttgatacttttggcctggtgatttattatagggtttcagatgagtgtgttctattagctgccatatgtacacaaaacaccaggggacaaactgaggaccaaggggacagctgaccgttgaatatctccaatttggggattaagtttgaaatggttggtttgtgaatggtaggaggaatctttagcctatgcactgagcctgtcagcttggatgatgaccatgcccaagagtggagccttactccctggagtccatagaaaccctgaaagctgttaggctttgtgtttcctgtaggctgcaactgttcccttcagggagctgtaagtgtctcaggttttgaaagttgtcatgatgaggttatctaaacctcatggaatcttccaccctctccaaggttgaccttataatacgaatcacttctcacctccaacatagaaccatgttattagccaggtgtattttttctcattaactctatttggggtttttggtttggattttattgttttcatcgcttttagtttttggtgttttcaatatgaagcggtgaactcaatggagatacaaagggtgagaaattccctctagttgaatccactatattcaagtaatgggattgcaagttgcatggtgggaagctaacatttaacatactaagcagatcataaaatgtcttactagaaaaaaagtcctttacttttttctgcctagctttcaaagacttcctaaacctgttttacaacccgaagcatgggactctgatataactgcagttctacatcatagaaacttcaatgagactgagtatccctcattgccctgcgtcaaactatagccccataagaaactaacaattagatgcaatttgcctttttcccttgccatactcatttgtctttatttttgtgtcatgtataagctcaagagaccaatgtgatgattattaatgtagaagaagtaatgatatttgtactggaaaaggcagctactagtacaaaaaataaaaagaaataatgatgataagcaaagtctcttaggtataacatgtccctaaaattcagggttttttttttaaagggatttaaggaaaaatacctgtgaaataggtgtgatttcttaaaacttttgttcccacgtattcctaaaccagcatcctcaatcttacccaaagatgctaattggcagacccacccttccttccttcctgcctgcctgccttccttccttcctttcttccttccttccttccctccctccttccttctttttcttttttttttttttttttgtgaaagttacactcttgttgcccaagctatagtgcaatggcatgatctcggctcaccgcatcctccacctctggggttcaagcgattctcctgcctcagcctcctgagtagctgggattacaggcacccaccaccacacctggctaatttttgtttttttactagagatgaggttttgccatgttgaccaggctggtcttgaactcctgacctcaggtgatctgcctgcctcggcctccctaagtgctgagattacaggcacatcttttcttaacagagaagaacaaagttcaagggatgagatggaaaaaggaggggaagaataccagctcagtacaactgttttgtgactgctctgctaagacatgtcagggcagaatgacagcagttttgaaagggcttgtcagtcagctgggtcatagatggaaagttaaaatgacctcctaaggtcaaagtttatatggctgcataatgcagtaaatgagtcgaattggtacccacaacttctgtcagtagggtcacataaggagtgtgtctgtctcattgactataatttatttcattcaacagcaaagctatatttgcggtggcactgactgtctgaattttgacaacttcattttgggctttaatagaaatgtagtttgctgcaacctagaaggacttagtctcctctgtccctctggtagacaggctgccaagaaatcttcatactttgtcaatattttagcattatctgcatatcatctggccctgagtagaaattattaacacttatgcattgctaatcttcagtgcatcatattgaatacattgggaagggatttgccctgttaaggaaagcagggagttgcaataggtttgttgtttgtcgttaacatggggttggttggatttttgaaagagaaatgctttaaaaaaatctttctcaggagtatcataaaacacaacatgtaatttaaaacccatttggataattgactgatttgacaagaagacaaccttagaattaaactatatattagaatcaaggagtgatatgattgtataccatcagtacataatactttgctattttgataggtatctcataagggactgaagcgaatatgcatatttcccctaatgtttctgtaatttagatttctttgtttagagccatgattggggagtaataaagctttacagaaacttcacgagctgattgacaagcctgttttcaagtaaaactgctgtgtggaatattttatttcatagcaaaacatgtctgtgtatttggttttcttctgactgtcttttgaaatatgttaccaggtttcatcagagcaagaaaaagaacaagagactttaataagccagaaaagcatccctgagcctctcccagcagcagacatgaagaaaaaaatagaagggtatcaggaattttcagcgaagcccctggcatccagagtagacccagagaaggacaacgaaacagaccaaggttccaacagtgagaaggtggcagaggaggcgggagagaaggggcccacacctccactcccaagtgctcctctggccccagaaaaagattcagccttggtccctggggccagcaaacagccactcacctctcctagtgccctggtggactcaaaacaagaatccaaactgtgctgttttacagagagccctgaaagtgaaccccaagaagcatccttccccagcttccccaccacacagccaccgctggcaaaccagaatgagacggaggatgacaaactgcccgccatggcagattacattgccaactgcaccgtgaaggtggaccagctgggcagtgacgacatccacaatgcgctcaagcagaccccaaaggtccttgtggtccagtcgtttgacatgttcaaagacaaagacctgactgggcccatgaacgagaaccatggacttaattacacgcccctgctctactctaggggcaacccaggcatcatgtccccactggccaagaaaaagcttttgtcccaagtgagtggggccagcctctccagcagctacccttatggctccccaccccctttgatcagcaaaaagaaactgattgctagggatgacttgtgttccagtttgtcccagacccaccatggccaaagcactgaccatatggcggtcagccggccatcagtgattcagcacgtccagagtttcagaagcaagccctcggaagagagaaagaccatcaatgacatctttaagcatgagaaactgagtcgatcagatccccaccgctgcagcttctccaagcatcaccttaacccccttgctgactcctacgtcctgaagcaagaaattcaggagggcaaggataaactcttagagaaaagggccctcccccattcccacatgcctagcttcctggctgacttctactcgtcccctcatctccatagcctctacagacacaccgagcaccatcttcataatgaacagacatccaaatacccttccagggacatgtacagggaatcggaaaacagttcttttccttcccacagacaccaagaaaagctccatgtaaattatctcacgtccctgcacctgcaagacaaaaagtcggcggcagcagaagcccctacggatgatcagcctacagatctgagccttcccaagaacccgcacaaacctaccggcaaggtcctgggcctggctcattccaccacagggccccaggagagcaaaggcatctcccagttccaggtcttaggcagccagagtcgagactgtcaccccaaagcctgtcgggtatcacccatgaccatgtcaggccctaaaaaataccctgaatcgctttcaagatcaggaaaacctcaccatgtgagactggagaatttcaggaagatggaaggcatggtccacccaatcctgcaccggaaaatgagcccgcagaacattggggcggcgcggccgatcaagcgcagcctggaggatttggaccttgtgattgcagggaaaaaggcccgggcagtgtctcccttagacccatccaaggaggtctctgggaaggagaaggcctctgagcaggagagtgaaggcagcaaagcagcgcacggtgggcattccgggggcggatcagaaggccacaagcttcccctctcctcccctatcttcccaggtctgtattccgggagcctgtgtaactcgggcctcaactccaggctcccggctgggtattctcattctctgcagtacttgaaaaaccagactgtgctttctccactcatgcagcccctggctttccactcgcttgtgatgcaaagaggaatttttacatcaccgacaaattctcagcagctgtacagacacttggctgcggctacacctgtaggaagttcatatggggaccttttgcataacagcatttaccctttagctgctataaatcctcaagctgcctttccatcttcccagctgtcatccgtgcaccccagtacaaaactgtaggctcagctctgcccagcagtccaaagcggcatggcccaccaagcttcactccttacccaggaggtgctgggcttatagagttagaagtcagtttttcttctaatctgagggtaagatcagtcccagcgtagggggccagaagggaggtgaacatgcctgatttttgtgggacaactctagcccacaaactgactggctggtgagtcttgactcccttccaacacagatgcccaggcacctccagatcattcacttcgcacgtgggccttgtgaagggatttgtgaatatccaggaagaacttagaggaccccatctgagttcggatggtcaggaaacaatctgggcaaaaaagaggcaggcatttcaaaggaaggggcaaggaagactggcaaacagatggcaagggatgcccctctttttcataaaactctccaaggttcaatcaatgcaatgtatagtgaaacttcaatagatctttcattttgacactattaaacaatccagagaagtaaacactgtt

SEQ ID NO: 1694 - DNA, 7851 bp, Homo sapiens
agattaatcctaccatatgaaagatttattaaaggagaagaagataagcccctgcctccaatcaaacctcggaaacaggagaacagttcacaggaaaatgagaacaaaacaaaagtatctggaaccaaacgcatcaaacatgaaatacctaaaagcaagaaagaaaaagaaaatgccccaaagccccaggatgcagcagaggtgagttgctttgctccatagaaatacctctggaagacatgtgctgcctcgaggtccttctggagccctgaatccacagctgtgtccctgcacagttggatggcttgatgaagaaaccaagaaatctaagcttcacagttccccacatagttccccagttcctgaaagcctttcagcttgctcatgagatgaaatccaatgcctagtattgaatgagatagcccaggaatagaatctagaaagatacaaacatcctgtagaaaactgatagcaaatgctcaggcttcaagagaaaagggtccagagccacactaacatcaaagaattttactgtgaaaacatggcttcttggccgctccacagcccgtctatctgaggtgctggtgcgactttaaaacatattttggggctggacatggtggctcgcgcctgtaatcctagcactctgggaggccaaggcaggtggattgcttgagcccaggaattcaagaagagcgtgggcaacatggtgagacccagtctctacaaacaaagctcacacctgtaatcccagcactttgggaggctgaggcgggcggatcacaaggtcaggagatggagaccatcctggctaacacggtgaaaccccgtctctactaaaaatacaaaaaattagccaggtgtggtggtgggcgcctgtagtcccggctacttgggaggccaaggcaggagaatggcatgaacctgggaggcagagcttgcagtgagctgagatcacgacagcctgggtgacagagcaagactccatctcaaaaaaaaaaaaaaaaaaaaaatatcaggcatggtggtgccccgctgtggtcccagctactcaagaggctgaggtgggaggataaccagagccctgggaggtaaagtctgcagtgagctgtgattataccactgcactcctgcctgggtgacagagtgaagccgtgtctcaaaaaaaatgctttggaggtccaggaaaggggaccttggaactgtggtgctgtatcctgcaagactctcctgaaaactttagagaagtgtttgtctcccataattgatttctgtgcaacagccatgggttgagaccaatttaagaaaatcttaagtgtggccgggcgcggtggctcacgcctgtaatcccagcattttgggaggccgaggcggtggatcacgaggtcaggagatcgagagcatcctggctaatacggtaaaaccccgtctctactaaaaatacaaaaaattagccaggcgtggtggtgggcacctgtagtcccagctactcaggaggctgaggcaggagaatggcgtgaacccaggaggcggagcttgcagtgagccgagatcaggccactgcactccagcctgggtgacagagagagactctatctcaaaaaaaaaaaaaaaaaaaaggaaaaaagatcttaagtgcatattatttataggggaattttgaaatggttcctatgaaaccattattatttttcatattaacaggtagtttctgcactttttaagcccccaacagccttttggtagaagccattacccccagcatgtagccagtcatgtaggctgatctgggctccatttcaacatgaataataaaaaacgctgctgcccattaaaaaaaaaaaaaaactgagcagccacatttggagacagcatgttctaggattcaaccccagagggaattttgatgctgatattaaataccccctaaaaaatcaggtttataatgaacacataagaggctccataattaaacactggtttaaattgcacatgtacaacacgcaccaacctcccatctagacatcaacttacccagctgactcttacataagaaaatagtattgataccaagattagaaatttgtgggttttttgtttttattaggtttcataattattttaagctctagtaactaaaaagggggaggaggaagaagatgatgcagattttttttttttttgagacagagtctctctctgtctcccaggctagagtgcagtggtgcaatctcggttcattgcaacctccgcctcccaggttcaagcaattctcctgcctcagcctcccgagtagctaggactacaggcatgcaccaccacacccggttaatatttttgtatctttagtagagacagggtttcaccatgttggtcaggctggtcttgaactcctgacctcaaatgatcctcctgccttggcctcccaacgtgctgagattacaggtgtgagccaccgtccctggccagatgatgcagatttctcaacatctgcaagcttgcaacataaatggccaaaagcaaggaaattccaagtgcatgcttacattccatttttccttgatacttttggcctggtgatttattatagggtttcagatgagtgtgttctattagctgccatatgtacacaaaacaccaggggacaaactgaggaccaaggggacagctgaccgttgaatatctccaatttggggattaagtttgaaatggttggtttgtgaatggtaggaggaatctttagcctatgcactgagcctgtcagcttggatgatgaccatgcccaagagtggagccttactccctggagtccatagaaaccctgaaagctgttaggctttgtgtttcctgtaggctgcaactgttcccttcagggagctgtaagtgtctcaggttttgaaagttgtcatgatgaggttatctaaacctcatggaatcttccaccctctccaaggttgaccttataatacgaatcacttctcacctccaacatagaaccatgttattagccaggtgtattttttctcattaactctatttggggtttttggtttggattttattgttttcatcgcttttagtttttggtgttttcaatatgaagcggtgaactcaatggagatacaaagggtgagaaattccctctagttgaatccactatattcaagtaatgggattgcaagttgcatggtgggaagctaacatttaacatactaagcagatcataaaatgtcttactagaaaaaaagtcctttacttttttctgcctagctttcaaagacttcctaaacctgttttacaacccgaagcatgggactctgatataactgcagttctacatcatagaaacttcaatgagactgagtatccctcattgccctgcgtcaaactatagccccataagaaactaacaattagatgcaatttgcctttttcccttgccatactcatttgtctttatttttgtgtcatgtataagctcaagagaccaatgtgatgattattaatgtagaagaagtaatgatatttgtactggaaaaggcagctactagtacaaaaaataaaaagaaataatgatgataagcaaagtctcttaggtataacatgtccctaaaattcagggttttttttttaaagggatttaaggaaaaatacctgtgaaataggtgtgatttcttaaaacttttgttcccacgtattcctaaaccagcatcctcaatcttacccaaagatgctaattggcagacccacccttccttccttcctgcctgcctgccttccttccttcctttcttccttccttccttccctccctccttccttctttttcttttttttttttttttttgtgaaagttacactcttgttgcccaagctatagtgcaatggcatgatctcggctcaccgcatcctccacctctggggttcaagcgattctcctgcctcagcctcctgagtagctgggattacaggcacccaccaccacacctggctaatttttgtttttttactagagatgaggttttgccatgttgaccaggctggtcttgaactcctgacctcaggtgatctgcctgcctcggcctccctaagtgctgagattacaggcacatcttttcttaacagagaagaacaaagttcaagggatgagatggaaaaaggaggggaagaataccagctcagtacaactgttttgtgactgctctgctaagacatgtcagggcagaatgacagcagttttgaaagggcttgtcagtcagctgggtcatagatggaaagttaaaatgacctcctaaggtcaaagtttatatggctgcataatgcagtaaatgagtcgaattggtacccacaacttctgtcagtagggtcacataaggagtgtgtctgtctcattgactataatttatttcattcaacagcaaagctatatttgcggtggcactgactgtctgaattttgacaacttcattttgggctttaatagaaatgtagtttgctgcaacctagaaggacttagtctcctctgtccctctggtagacaggctgccaagaaatcttcatactttgtcaatattttagcattatctgcatatcatctggccctgagtagaaattattaacacttatgcattgctaatcttcagtgcatcatattgaatacattgggaagggatttgccctgttaaggaaagcagggagttgcaataggtttgttgtttgtcgttaacatggggttggttggatttttgaaagagaaatgctttaaaaaaatctttctcaggagtatcataaaacacaacatgtaatttaaaacccatttggataattgactgatttgacaagaagacaaccttagaattaaactatatattagaatcaaggagtgatatgattgtataccatcagtacataatactttgctattttgataggtatctcataagggactgaagcgaatatgcatatttcccctaatgtttctgtaatttagatttctttgtttagagccatgattggggagtaataaagctttacagaaacttcacgagctgattgacaagcctgttttcaagtaaaactgctgtgtggaatattttatttcatagcaaaacatgtctgtgtatttggttttcttctgactgtcttttgaaatatgttaccaggtttcatcagagcaagaaaaagaacaagagactttaataagccagaaaagcatccctgagcctctcccagcagcagacatgaagaaaaaaatagaagggtatcaggaattttcagcgaagcccctggcatccagagtagacccagagaaggacaacgaaacagaccaaggttccaacagtgagaaggtggcagaggaggcgggagagaaggggcccacacctccactcccaagtgctcctctggccccagaaaaagattcagccttggtccctggggccagcaaacagccactcacctctcctagtgccctggtggactcaaaacaagaatccaaactgtgctgttttacagagagccctgaaagtgaaccccaagaagcatccttccccagcttccccaccacacagccaccgctggcaaaccagaatgagacggaggatgacaaactgcccgccatggcagattacattgccaactgcaccgtgaaggtggaccagctgggcagtgacgacatccacaatgcgctcaagcagaccccaaaggtccttgtggtccagtcgtttgacatgttcaaagacaaagacctgactgggcccatgaacgagaaccatggacttaattacacgcccctgctctactctaggggcaacccaggcatcatgtccccactggccaagaaaaagcttttgtcccaagtgagtggggccagcctctccagcagctacccttatggctccccaccccctttgatcagcaaaaagaaactgattgctagggatgacttgtgttccagtttgtcccagacccaccatggccaaagcactgaccatatggcggtcagccggccatcagtgattcagcacgtccagagtttcagaagcaagccctcggaagagagaaagaccatcaatgacatctttaagcatgagaaactgagtcgatcagatccccaccgctgcagcttctccaagcatcaccttaacccccttgctgactcctacgtcctgaagcaagaaattcaggagggcaaggataaactcttagagaaaagggccctcccccattcccacatgcctagcttcctggctgacttctactcgtcccctcatctccatagcctctacagacacaccgagcaccatcttcataatgaacagacatccaaatacccttccagggacatgtacagggaatcggaaaacagttcttttccttcccacagacaccaagaaaagctccatgtaaattatctcacgtccctgcacctgcaagacaaaaagtcggcggcagcagaagcccctacggatgatcagcctacagatctgagccttcccaagaacccgcacaaacctaccggcaaggtcctgggcctggctcattccaccacagggccccaggagagcaaaggcatctcccagttccaggtcttaggcagccagagtcgagactgtcaccccaaagcctgtcgggtatcacccatgaccatgtcaggccctaaaaaataccctgaatcgctttcaagatcaggaaaacctcaccatgtgagactggagaatttcaggaagatggaaggcatggtccacccaatcctgcaccggaaaatgagcccgcagaacattggggcggcgcggccgatcaagcgcagcctggaggatttggaccttgtgattgcagggaaaaaggcccgggcagtgtctcccttagacccatccaaggaggtctctgggaaggagaaggcctctgagcaggagagtgaaggcagcaaagcagcgcacggtgggcattccgggggcggatcagaaggccacaagcttcccctctcctcccctatcttcccaggtctgtattccgggagcctgtgtaactcgggcctcaactccaggctcccggctgggtattctcattctctgcagtacttgaaaaaccagactgtgctttctccactcatgcagcccctggctttccactcgcttgtgatgcaaagaggaatttttacatcaccgacaaattctcagcagctgtacagacacttggctgcggctacacctgtaggaagttcatatggggaccttttgcataacagcatttaccctttagctgctataaatcctcaagctgcctttccatcttcccagctgtcatccgtgcaccccagtacaaaactgtaggctcagctctgcccagcagtccaaagcggcatggccaacagagcttcactccttacccaggagtgctggcttatagagttagaagtcagtatttcttctaatctgaggctatgatcagtcccagctgtaggggcccagaggggaggtgaacatgcctgatttttgtgggacaactctagcccacaaactgactggctggtgagtcttgactcccttccaacacagatgcccaggcacctccagatcattcacttcgcacgtgggccttgtgaagggatttgtgaatatccaggaagaacttagaggaccccatctgagttcggatggtcaggaaacaatctgggcaaaaaagaggcaggcatttcaaaggaaggggcaaggaagactggcaaacagatggcaagggatgcccctctttttcataaaactctccaaggttcaatcaatgcaatgtatagtgaaacttcaatagatctttcattttgacactattaaacaatccagagaagtaaacactgtt

SEQ ID NO: 1695 - DNA, 11343 bp, Homo sapiens
gccggccgcggcccgcgggggcgacgcagcagcccgctgtccccgcgccgccggcgggggagctgatccagccgtcggtgagcgagctgtcccgggccgtgcggaccaacatcctgtgcaccgtgcgcggctgcggcaagatcctgcccaacagccccgcgctcaacatgcacctagtcaagagccaccgcctgcaggtgagcccgacgcggccggcggcccggggggccgggcctggctccaacaaagcgcccggcgccggcgcgcgaagccggcctcggggggacgagcgccctgcgcgctgccgctgccgctgccccaccggcctctgccctccccggccggaggcggctctcgaaccctcgcggcaggcgccgcaggtgcggcctctgggggggaggaggagctgggagccccgggtccgccgtacgcgccagttccctggttccctggctccctggccccgagtgtcgtgccggacgccggcccaggctttttacacttttttgcctgtgagttcttaacggcgttttggcgagggacgcatcgtctccattatattaatgagaaacagattatgcaacctagatgatgcggggctttaaaccggggcctctggttctgaagccctgtgcttgccacgacacccacaatgccgcccttgggtcctgcccagtggactgtatgtgccacaataactagaagagagggttttaaatgttctcaccaccaagagacaatacgtttgaggtcgaggacatgttaaacactctgacttgatcactatgcaatgtatatgtccatccatgctgcacaccgcaccccatcagtaggaataattactgtgtgtcgattatgaataaaaaaatgttttaaaggagcggtaggtttgcctctaaacaccatcagtcagtttcacggtgttggtaagatcagctcaggactgagacctaagggaaattgcccctgtggctcttctttaagagggggacacagtaaatacaccatgacaatagtctcaacaaccctccacgttatgcaaaacagggcagtcattttcaaccttgggacacatctgtgacgagcttattaaaaatccagatgtccagccccaccccggacctgttaagtcacaatctctcagtcattacaatggcaagtttccttccaccactctaggccagcagtgacataattcaaaagcgcaagtcattgaaagcagttctgcgaatatgtagcttttgatgatcaggagtaaatttagagtacccagaatattgcatgttctgtctgcccatagtcaggcttctgataagaatttcacagcagaaaactctgaggttgtagtctctagtaggacagatgtgtcgccaatgaagagtgatctgctcttaccaccatctaaaccgggatgcaacaacgttctcaattgaagatcagggagccagtcaggaaatgtacctgaggtatgctgaggaagaccgtgcaggtggggccgaattgttggactgaaaagctctgggtttctttcagcactcaagtgtaactctgggaatggctttcaacctgttgttttgttttcatactaaattttaactaaatcctttttttccctattgtttttgtgtttttttgtttgtttttgagacagagtctcactccatcacccaggctggagcgcagtggcgccatctcagctcactgtaacctctgcctccggggttcaagcagttctcctgcctcagcctccctagtagctgggattacaggcacctgccaccacaccctgctaatttttttttgtatttttagtaaagacaggttgcaccatgatggccagcttggtctcgaactcctgaccctcaggtgatccacccacctcagcctcttaaagtgctgggattccaggtgtgagccaccgcgaccgacctaaatcctttatttaatcataacttaggtggatgaactatttcttaatagtttctgttgttcctttctgtggagttgttgttaggagctctagctctttaaagaccctggtaaacatctgttgaacataaagataccatttgcctttcaggactggttagtatacagtaggtttgtttctaattatgttgggttttttttgttttgtttgagacagagtctcactctgtcgcccaggctggagtgcagtggcgccatcttggatcactgcaacctctgcctcccaggttcaagcgagtctcctgcctcagcctccctagtagctgggattacaggtgcataccaccacgcccagctaatttttgtatttttagtagaggtggggtttcaccatgttggccaggctggtctcgaactcctgacctcaagtgatccacccgcctcagcctcctaaagggctgggattacaggtgtgagccactgtgcccagccagggcaaacttttttttagcaggaattatacctcaccagatccatcatttttttcttgacaagcagactgactttcctgtcttgtcctggctttctaaccgcagtgccccgtggcccctgagcagctcctgtcttggtgtcttcctttaatgaaggttgtctgtgtgatgcaatagccatctatatgatggtgcccagtatggagatctgtaccctgtctggttactacatagaaggcttttcagggtcttgctctgttaacccaggttgctgtcaggctcttgagctcaagtgatcctcctgctttagcctccccagtagctgagactataggctcctgccaccatgccctgcctcaaacattgttctttttgtttgtttgtttgagacagtctcactctgtcgcccagactggagtgcagtggcatgatctcggctcactgcaacttccgcttctcgggttcaagcagttctcttgcctcagcctcccgagtagttgggactacaggcatgctccaccacgcccgactaatttttgttttattagtagaaacagggtttcgccatgttggtcgggctggtcttgaactcctgacctcaagtgatccgcccgcttcagcctcccaaagtactgggattacaagagtgagccactgcgccaggcctcaaacatcaatgttgatacctgttttcaaagtactggaagaaggtaggggtaaggacaaggaaccgggaggaaggctggctgggaagctatcttaggttttaagagctgtgttgaccagagactccatccactttctgccctgagtatcttattggcaggttttcttatagtcagtggaaattttcggtcttagttacagctgcttgcataatttctttcattgtttatatattttctagattatattttcttcccctccccactagttgctgttggttcttattttattctaatctttcttcccaaaacaccccacccccaaccaaatcttcccttcttaacataaatgatgagcaacgaggatgggtgagaatgaggaattggattgcaaactgtagagtatgtgccgccttctggtttgatgtgggtgcctaaggtatatggccatattccatatcctgtaaggaaatccagaaatctagcccagccttgtgtatggtgggattcatggagaaatgaaagccatgaggattcaggggcaggaagagcagaagtaaatgtacatttttttattcctagagattcttttgttccttgtgtgtgaaagcagtggaggggacaggcaggcacttaaagaacctcttatcaagcaacatttatattgtaaaacatggcttagaggattttgtgttatttttagtccagaggtttgtttttaatgatttgccagaaattttttaaggaaaggaaaggttccaagttactctatagactatactgtacaaagatttctaattttaaatttagaataagatgacaaagcaaaccgtttccttcttggatgctttctcggaaggcagtcaggtggtgctagagtagctagacagacagtttttcctagtttttgctacagttcttacaatcgtttcttttcaccctctactcttcaactgtgtcttacttttcctcttgtatattttctttctgtcttgttactggattgtttcctctcataggttctcttttcagttatgcgcacaaaagatacagtacaaaaagtccagtgcattttattcttgaaagtatatagaacttcagaatgaaaacaccactttctcactgcacttccattttatcgtgccattgccatttctcatctgagccatcctacccttgagcttattctctgaggacagaaatgggaagaaggccccagaagcagtgggtgggggtgggaggaggctgctgtgctggtgagtggtggggtgttggctctcagaaaacaggagcatggacagtgtcagcttgttgccatgacagtgaggttattaacatccacttagactgtcttcagtggtctcttacccaggcatgatagttttggcttagatggctacctgaagagattcagtataatgctaccagtttttattgaacatttattctgttcaaaacattcccaaaggcaacagaagatacaaataaatctctgcccatgaaaaggtgtggggggcattagaaggcgttctcttcggtgtaatgaagtaatgagagaagaaaaagtagtttgaagctatggagtaagggactttgagtatcccaggctcaaaaagttgggacttgaacagtacgggggtgctgctgaaaacgtttgagggaggtaatgacatgatcgaagctatacttgagaaaggtgaatctgataaagtatgagtgaaaaagagactgaaggtctagaaattagattgaggctaatgacaaaatccacataaataggaggacttgaacgaaggggcacttagaagaggacaggagatagtaaaaggcattcaatgatgagagcacacactacaggggagcatgagggaggttggaaaagataatgaaaggattaccgagcttcactgacgatgtgtttgaaatgagcaggaatcttgtagtgatcctaatccgtggttttctggagcatttcacagcctaggaacatacaaggggggcatctccctggaatgtaaattgactaagaggaattcaataatggtcaaatgaatgcagaattttagagtcttgcttagtattctcaccacatttcgtttagtctactcatactctttttctcttactgctgacactagatggaaaaactcttaattaaaagtatttcacaaaatgtgctcgttttcagtcattccgtttccactccagcctgttgtgttgtttttttgaaataataatttaaagtaattttccttttgcaggatggcatagtcaatccaacaataagaaaagatttgaaaactggaccgaaattctactgctgtccaattgaaggctgccccagaggccctgagagaccgttttctcagttttctctcgtaaaacaggtactctctactctgaggatgagatacagatgctaaaaacctattgtgcattctgattacttagcagacataactacagaattgagtagacagctgcttgtgaggggagatgcctgcgtgtctcccagttggtataaacctgagtatgctgttacacaagtggagggaaaagcggcacggtctggagggaatatgtctagaagtgagttaaaatacagagagagagagtaaaccagttcagcaaagaatgagaaaatgtttgctcgcagatctcctgtgtgagtctgcatacctccaagggcccagcgcaaaggcacaaaggaactgttctcccaggggaataagaacctgcagaatccaggaaaagaagagttttggaagccgcaatcttaagaggagggagggccccagtgactgggacaagaggtgattcagaactggaagagattggcatctgaaatgttcccctgagggtctgctggagggcgtcctgagaagagcattgtaaagacatttttttcctgcctgcagcacttacagatcagagtgtaaatgctggagaccatagatgtttccaaaacaatctcctcacttttcacaaagcaaaagcaacaagaagaggcatatatataattaactgcgatgttcctgcttttacattcttttgacttggactgctgtattttatgttatttatattaatagtgtaaaatcattattaatttgggtgtatgatggtttctgaaatgttttgaccagttgctgtttttcaccttagtcccttctgcgttcctcctagcactttatgaaaatgcatgctgagaagaagcacaaatgtagtaagtgcagcaattcgtacggtacagaatgggacctgaaaagacatgcagaggactgtggcaagaccttccggtgcacatgcggctgtccctacgccagtagaacagcactgcagtctcacatctaccgaactgggcacgagatacctgcagaacacaggtgaagggaaagaaatgatggcacagaagtcagtagctatgggaagcatttcagatgaaacatcctggagagccagtggtgtggggaggaaaaaggaatcttagaaaatgtgtgacgtggaagaaggaagcttttgaaaatggaagcaggtcttgcaaatgacacatgtctgggcctgaaatcttgacccaattgttccccctatttttttctgccagccctctttgagagtcccttgttatttccatttgaaaatctcagcttccagaattttctatcagagggaaccaaactgccaacaaataagttttatcatgaaactgtacttcatttaaaggtcaaattttcatttagtgtgatagcttcctgccttagaaatgataaaacttgcattatgtaagtcttttagcttcttttggcttaaagatctgagttgagttctagtacttagagcttaacaaaaggtatgtttcctccttctctgtttgcatgtttctcaaagttcacctgctataataggaccaactcccagagttgcgaaagaatggatttatcttgtctgggttgaacatgacctctgctatagatgggggaaatggcatttgtaagtgaggatagagtgtcatggtcgaagaaagttgtattttaaggttttctttttgctctgtcattgttttcagggacccacctagtaagaaaaggaaaatggaaaactgtgcacaaaaccagaagttatccaacaagaccattgaatcattgaacaaccaaccaatccctagaccagacactcaagaactagaagcttcagaaataaagctagaaccatcttttgaagactcttgtggctctaacactgacaagcagactcttacaacaccaccgagatatcctcagaagttgcttttaccaaagcccaaagtggctttggttaaactacccgtgatgcagttttctgtcatgcctgtctttgtgcctacagccgactcctcagcccagcctgtggtgttaggtgttgatcagggctctgccacaggggctgtgcacttaatgcccttgtcagtaggaaccctgatcctcggcctagattcagaggcttgctctcttaaggagagcctacctcttttcaaaattgctaatcctattgctggtgagccaataagtactggtgttcaagtgaactttggtaaaagtccatctaatcctttacaagaactagggaacacgtgtcaaaagaatagcatttcttcaatcaacgtgcagacagatctgtcttatgcctcacaaaactttataccttctgcacagtgggccactgctgattcctctgtgtcgtcttgttctcaaactgatttgtcgtttgattctcaagtgtctcttcccattagtgttcacactcagacatttttgcccagctctaaggtaacttcatctatagctgctcagactgatgcatttatggacacctgtttccagtcaggtggggtctccagagaaactcaaaccagtgggatagaaagtccaacggatgaccatgtacagatggaccaagctggaatgtgcggagacatttttgagagtgttcattcatcatataatgttgctacaggtaacattataagcaacagtttagtagcagagacagtaactcatagtttgttacctcagaatgagcctaagactttaaatcaagatattgagaaatctgcaccaattataaatttcagtgcacagaatagtatgcttccttcacagaacatgacagataatcagacccaaaccatagatttattaagtgatttggaaaacatcttgtcaagtaatctgcctgcccagacattggatcatcgtagtcttttgtctgacacaaatcctggacctgacacccagctcccatctggcccagcccagaaccccggaatcgattttgatatcgaagagttcttttcggcctcaaatatccagactcaaactgaagagagtgaacttagcaccatgaccaccgagccagtcttggagtcactggacatagagactcaaacggacttcttactcgcagatacctctgctcagtcctatgggtgtaggggaaattctaacttcttaggccttgagatgtttgacacacagacacagacagacttaaactttttcttagacagtagccctcatctgcctctgggaagtattctgaaacactccagcttttccgtgagtactgattcatctgacacagagacccaaactgaaggagtctccactgctaaaaatatacctgctctagaaagcaaagttcagttgaacagtacagaaacacagaccatgagttctgggtttgaaaccctggggagcttgttcttcaccagcaacgaaactcagacagcaatggatgactttcttctggctgatctggcctggaacacgatggagtctcagttcagctctgtagaaacccagacttctgcggaaccacacacagtctccaacttctaaaactaacggtggagtccatgtgtgaaatggcatctaccatttcctctggattaaaactacggactggggacaacagtattaattcgattgaatgtggctgatgatgcagttgcttagcttctttgtgtttctttgccttttgtacttgtaaacagaaatttgcgtataaatgtgagtgtattataaagtttgagatgttgatctaaattgtttttgtgttgcctacatttgccttttcacagctagtcttttcatgttaaaaaaaaaatgtatttcatatctataaaacctatatagccatttagctgaagcccagcttaccaggttcaagggtacaaacttctcaaatcttcaaaacattttagtcaaagtgtaatatacttaaactgcacctaaaatatctttggcactgcttgttagaaattcctgattcctgttactaatcactaaagaaaccggatgctgccaccgtaggatttaagcagtagtgcttccatgctcttaagactcctgctgcctggaccttcgtcagctttgacacctcttttctgatttaaagacaccaaggaaaactacaactgtctttagctttgaagcagttttcatgtaatcattgccacctcttcgctacatgaactactattgataccagcatacaagtgtatagcactttacacacaagaggtttattgatgtaaaattatcggctagggaagcagcagcgggccaggtgtggtggcttacccctgtaatcccagcactttgggaggccaaagcaggacgatcacttgagcccaggagttcaacaccagcttgggcaacataagaagaccgtgtctctggaatttttttttttttttaattagccaggcacagtggcatgcgcctgtgatcccagctacttggaaggctgaggtgagaggatcactcgaggagattggggctgccatgagccatggtcttggcactgtactccaacctgggtaacagggcaagaccctatctcaaaaaaaaaaaaaagtcgccagcaacaagcacgtagtgtagtgttcctgctaaatgagcataggttatccaaaccttgggaacagggagttatggaaacgtgcctatgacttcatcttggggtgtgtcctatgaagatcctttctggtctccacagtaggccagagttgggggctctggagctgtttccccaagtgcatccacaagctggatctgagttttgtcactctaaaattaaacaagaaaaaaagtgggaaaagggcatcccccattaggtttcaatactttgcacttctactaagcttgatagggcaggagtgcaatctacaattattttaaagtgaatttccttccattcaccattctttatcttttctttgaataagaaaaagtatctagcaaggatattacttgtgccttgaggctagcaattataggatagattcatctaaaatatggtattctgcattttggttttttttcttaagtgaataataccagtcttcaaagaaaacaaggtgaagacctattgcttcaataatcaagaatgctttgtgtgttttgaggtaggagcatgatcaagtatgctttggggattttctgtatttaggagatcctggattcttaattgttggctaagttccagtcaagtaggaatcagtgcagcctgtaagttctccacattgacacacacacacacacacacacacacacacacgacatgctcctttctgtggcacatgcctgtattactgaaagctaaatcctcaaaacctagtaaggggaccaatgattcattaaagtaaattgatggttttgctactaattcctatcccatacatttgacacaaaagaagtgttggtaatggataaataacatatcccgggcagatgagctcaacctagtaggtaagagtttggtttggtcacagttgcctatgagtgtgggtttcaaaagaaacataaagccttaacttagaatttcattatgttttagaatcatcactgccttaatattcaagcatctatttaagtcctaataaaggagaaatgcatgtttatggcttttttgtaaatataaatgcagtgatctatggcttaaaaaatttgtttctgtgacaatgtttgtaaatctagccaatagagtcatttacagaagaaaaatgagcatgtaataatacaagaactgtttccccctcaaaacctgaacctgaattatttgtaaaaactgaaatttaatgattaaagagaagccagaattgtacccttttttgtgaattcttgaacgtactcataaatatgacttattgtattgccttaagttttcactcattgtcttttgaaagccatatgataaaatgattttatttaataata

SEQ ID NO: 1696 - DNA, 970 bp, Homo sapiens
ttactgattctggagatggaggaagggtccgcaagccaaggaatgtaggcaacctctagaagctgggaaaggcaagtgaacagattctcccctggagccttgggaaggaatacagccctgctgacaccttgatcttagcccagcagtctcatttcttttgacctccagagctggaagataataaatgtgtgttaaggcagtaagtttgtggtaatttattaatagcaagagaaaacgaatatagctgctagtatgtaaaaggtggaaattttcacataaaactctagccataccaaagatgagtagcagctgcccccttttaataaaggatgtgtttccaatttcactgcagtcctcacccctcccttttgtctaccccagcctcctatgtccatttacatgaactacccagtctaagtattaagttttgtaatcgtatactgaactgcagtgtctcccaaacagtaatcctaatttcagcagctaaaatagaagcaagcaaatccagccttcttaaaatgattaaccctatcaataataacaatcttttcatttgtatagtgtggtctaggtcaagttacttaatttatataagcctaaatgtccttctctgcacaaggtggggcaagttacagtacatacccgctacagtcgttttgaagacaaaatgagacacagcatgaaaagtgcatccaccagacccacctggtacccagtaaggcctaggtaataaacaacggcggaaatcagtgtacttctgcctcacctgccactagacatttgggttgtttctaatctttgggaagtaaacgcattgctcaacgtattgctttttcttttatgtgactactgcctgaagtcactttcctaggaagaatggatcgattagagaggcggggcaataccttttacctgctggcaggtgaaatttcgcctcctggcggcgtcacctaaagtcctctccctccaa

SEQ ID NO: 1697 - DNA, 2853 bp, Homo sapiens
agtctgtgtcttttaacgggggcatttagcctgtttacatttaaggttaatattgttatgtgtgagtttgatcctgtcattatgatgctagctggttattttgcccgttagttgatgcagattcttcataatgtcaatggcctttacaatttggtatgtttttgcagtggctggtactgctttttcctttttgtatttagtgcttccttcagaagatcttgtaaggcaggactggtggtgacaaaatctttcagcatttgcttttctgtgaaggattttatttctccttcacttatgaagcttagtttggctggctctgaaattctgggttgaaaattcttttctttaagaatgttgtgccaggcaccgtggctcatgtgtgtaatcccagcactttgggaggctgaggctggcagatcacctgaggtcaggagttcaagaccagcctgaccaacatgggaaaactccatctctactaaaaatacaaaattagccagctgtggtggcacatgcctgtaatcccaactacttgggaggctgaggcaggagaatcgcttgaacccaggaggtcaggttgcggtgagccgagatcttgccatcatactccagcctgggcaacaagagtgaaactccatctcacacaaaaaaaagaatgttgaatattggcccgcactctcttctggcttgtagtgtttccgcagagaaatccactgttagtctgatgggcttccctttgtggataacccgacctttctctctggctgcccttaacgtttttttcattcctttcaaccttggtgaatctgatgattacgtgtcttggggctgctcttctcgagaagtatctttgtggtggtctctgtctttcctgaacttgaatgttggtctgtcttgctaggttggggaagttctcctggataatatcctgaagagtgttttccaacttggttccattctccccatcattttcaggtacaccagtcaaacataggtttggtcttctcacatagtcccatatttcttggaggctttgttcattccttttcattcatttttctctaatcttgtcttcatgctttatttcattaagttgatcttcaatctctgatatccttttttccacttgatcgatttggctattgatacttgtgtatgcttcacaaagttcttgtgctgtgtttttcagctccatcaggtcattgatgattttctctagactggttattctagttagcaattcttctaaccttctttcaaggttcttagtttccttgcagtgggttagaatgtgctcctttagctcggaggagttacccaccttccgaagcctacttctgtcaattcgtcaaactcattttccatccagttttgtttccttgctggcgaggagttatgatcccttggaggagaagaggtgttctggtttttggaattttcagccttcttgtgctggtttttcctcatctccctggatttatctgcctttggtctttgatgttggtgacctttggatggggtttttgtgtggacatcgtttttgttgatgttgatgctattcctttctgttttttagtttttctcctaacaggcaggcttctctcctgcaggcctgctggagtttgctggaggtccactccagaccctgtttgcctgagtatcactagcagacactgcagaacagcaaagattgctgcctgctccttcctctggaagtttcgtcccagaggggcacccgccagatgctagtggagctctcctgtatgaggtgtctgttgacccctgctgggaggtgtctcccagtcaggaggcacaggggtcagggacccacttgaggaggcagtctgtcccttagcagagtttgagtgctgtgctgggagattcgctgctctcttcagagctggcaggcaggaacatttacgtctgctgaagctgcacccacagccgcctcttccgccaggtcctctgtcccagagaggtgggagttttatctgttagcccctgactggggctgctgcctttctttcagagatgccctgtccagagaggaggaatctagagaggcagtctggctatggcagctttgcagagctgtggtgggctctgcccaattcgaacttcccagaagctttgtttatactgtgaggggaaaaccacctactcaagcctcagtaatggtggacgcttctccccacaccaagcttgagagtcccaggtcgacttcagactgctgtgctggcagcaagaatttcaagccagtggattttagcttgctgggctctgtggcggtgggatccactgatccacttggctccctggcttcagttccctttccaggagagtgaacagttctgtcgctggccttccaggtgtcactggggtatggaaaaaaaaaaaaaaaaaaaaaaaaccttctgcagctagcttggtgtctgcctaaatggctgccctgttttgcgcttgaaacccagggccctggtagtgtcagcactcgagggaatctcctggtctgtgggttgtaaagaccatgggaaaagcatagtatctgggttggaatgcaccattcctcattgcacagtccctcatggcttccctttggtgggggaggttgttttctcaccccttgagcttaccgtgtgaggtgatgcaccccccctgctttggctcgtgctctgtgggctgcacccactgtctaacctgtaccaaagagatgagccaggtaccttagttggaaatgcagaaatcacccactttctgcattgatctcactgggagctgcagacctgagctgttcctgttaggccatcttgccagccactcatattttacttttaagtgattaggttgtttgggaga

SEQ ID NO: 1698 - DNA, 2853 bp, Homo sapiens; identical to SEQ ID NO: 1697

SEQ ID NO: 1699 - DNA, 421 bp, Homo sapiens
tgaggagtgttttacttccaattctgtggtcaattttagaataagtgtgatgtggtgctgagaagaatgtatattctgttgatttggggtggagagttctgtagatgtctattaggtctgctttgtccagagctgagttcaagtcctgaatatccttgttaattttctgtctcgttgatctgtctaatattgacagtggggtgttaaagtctcctactattaattgggtgggagtctaagtctctttgtaggtctctaagaacttgcttatgaattgggtgcttctgtatagggtgcctatatatttagggtagttagctcttcttgttgcattgaaccttttaccattatgtaatgcccttctttgtcttttttgatcttggttggtttaaagtctgttttatcagaggctaggattgca

SEQ ID NO: 1700 - DNA, 340 bp, Homo sapiens
aatttcttgtgtatatgcatcttttacatataaaggctgttttaaaaatgagttgctgctttatagtttcttctttagaaacatataagattaaagataaaagaaatagaatagggaaatagcctagctatagaaacagcacttttaaatttcatatgtacagtgatttattatttgcaaatcatctactttttaaaagtatgatactttattatttgcaaattatttaatttttaaaagtgatttttgtgggaggtcagagttggatggagaagggtcattttcatttttgattagaggattcttgtaatgacctgatgaaaactgctctgagggcatc

SEQ ID NO: 1701 - DNA, 340 bp, Homo sapiens; identical to SEQ ID NO: 1700

SEQ ID NO: 1702 - DNA, 421 bp, Homo sapiens; identical to SEQ ID NO: 1699

SEQ ID NO: 1703 - DNA, 126 bp, Homo sapiens
  misc_feature (9)..(9): n equals a,t,g, or c
  misc_feature (17)..(17): n equals a,t,g, or c
  misc_feature (19)..(20): n equals a,t,g, or c
  misc_feature (32)..(32): n equals a,t,g, or c
  misc_feature (107)..(107): n equals a,t,g, or c
  misc_feature (113)..(113): n equals a,t,g, or c
  misc_feature (117)..(118): n equals a,t,g, or c
ttttttttntttttttntnntttttttttttnttttttttttttttttttttttttttttttttttttttttttttttttttttttttttttttttttttttttttntttttntttnntttttggc

SEQ ID NO: 1704 - DNA, 8421 bp, Homo sapiens
acgaaagcggccaagtagagctccgtcctgacgcgccgcctcccgtgggctccggccggctaagccgcggcggacaactatgctgaaagccaagatcctcttcgtggggccttgcgaggtaagtcctggcccggcgcggcagagggagcggggagcaggcctcggggcctgggcgagcgcaggtccccacccgtctgatctgcggcttgctcccggaggcgggaacccgggcccaccgcgcccatcccgactggcgcccctgccctttccgtgaactcggtgctttcagaccttgattccaaccactgcccggaggaggtagtggaggcgagcccggtgttaatgagccccgaaggcccaaggtactgagtggcatcattggaaccatagcctaggtttcgtgactctttcttttgcccccgggatccccctaatgaatgcgtctgtgggtctggacttttgtttgagacaggttgtcgctgtgtcgtccaggctggagtgcagtggtgtgatcatagctcactgcagcctcgacttccctgggctcaagcagtcctcctgcctcagcctcctgagtacctgggactacaggcgtgcaccaccacgcccgactaaatttgttgtttttgttttgttttgtttttttgagacagagtctcgccctgtcacccaggctggagtgcagtggcatgatcttggctcagtgcaaactccgcctcccgggttcaagcgattctcctgcctcagcctcctgagtagctgagattacaggcccacgccattacccctggctaatttttgtattttttgtagaggtgtgttttcaccttgttggccaggctggtctctgctgacctcaagtgatccgccagcctcggcctcccacagtgctgggattatagggatgagccaccgcgcctggccttaatttgttaattatttgtagagacaggatcttgctatgttgcctagcacctaggctggtctccaactcttgggctcaaacagtcctcccgcctcagtctctcaaagttctgggattacaggcatgagcctttgctcgagtcctgggcgttttactatatggtcctggaaccattggctattaatgtgtgtgttgggggcgtggtagtggggatcacatctacatgtatacttcacatcatccacagaaataaagctcagatggactaaggctaaatgcgtttaaaaaaaaaaaaaaaaaaaaaaggccgggcgcggtggctcacgcctgtaatcccagcactttgggaggccgaggcaggcatatcacaaggtcaggagatcgagaccatcctggctaacacggtgaaaccccgtctctactaaaaatacaaaaaattagccgggcgtggtggcgggtgcctgtagtcccagctactcgggaggctgaggcgtgaacccgggaggtggagcttgcagtgagccaagtctgcgccactgcactccagcctgggagacagagcgagactccgtctcaaaaactaataataattaaaaaaaaaaaacccagccggatgcggaggctcacgcttctaatcccagcactttgggaggccaatgcaggtggatcacctgaggtcaggagttcgagtccagcctgagtaacatggtgaaaccccatctgtactaaaaatacaaaaattcgctgggcttggtggtgcatgcctgtaatcccagtgactcgggagtctgaggcaggagaattgcttgaatccgggaggcagaggttgcaataagccaagatcgcgccattgcactccagcctggggaacaagagcgaaactccatctaaaaaaaaaataaaataaaacctgtagaagtcttaggccaggcacagtggctaacacctgccagcactttgggaggctgaggtggggagaccacttgagctcaagcattcaagaccagcctgggcaacatagggaaaccccatctctacaagcaatacaaaaattagctgggcatggtgatgcacacctgtagtcccaggtggctcaggaggctgaggcaggaggatcactggagccctacagatcaaggctgcagtgagctatgatcacattgctgtactccagcctgggcaaccgagcaagaccttgtctcaaaaaaaaaaaaaaaaaaaagcaatgtgtattactcatataatcgagatggacaaacagctgcatgtgagattatgagacagctagccacgagtccccaggctgactttgatcctctctgtgacctaaaagaactccttggctgggcacagtggctcatccctataaacccagcactctgggaggcccaggtgtgtggatcacctgaagtcaggagttcgagaccagcccgagtaacatggtgaaaccccaatttctactacagatacaaaagtaagccgggcgtggtggcaggcgcctgtaatcccaactactctggaggctgaggcaggagaatcgtttgaacccgggggttgcagtgagcctagatcacagcctgggcaacaagagtgaaactctgtctcaaaaaataaaaataaaaactccttaatcccatgctccctggaccccagaccaggctgtgcccactgcactagagcaagacagtgaggtcgtaaccaccccagtgatctcagggtgcccatgacctatactgcaccacaccgggttccaggccacctcttggggtcatttttttggtttccttttctgcctttcagcaaagacctttatttgcactcattttcacagagtggaaaaactgttttggccaactttctgacagaatcttctgacatcactgaatacagcccaacccaaggagtgaggtgagccctgacaaatctgtgtcccagagtgtccaactggctcggcagggaggctcattcctctaatcccagtgctctgggaggtcaaagcgggaggatcgcctgaggcctgggcaatatagggagaccccgtctcaactaaaaataaaacattagccaggtgtgttggcatgtgtctgtagtctcagctacatgttaggttgaagcagaaggattgtttgaggccaggagttggaggctgcagtgagctatgatcgtgccactgcactccagcctgggtgacagagtgagaccctgtctcaaaacaaaattaataataaaacaattttaaaagactgcccagccatcacccacttcctacttttgttgctgttggcattccaaaagtgtaatgcagcctcattattggtgctgctactgttcgtcttttttttttgggatggagtctcgtcctgtcgctgaggctggagtgtggtggcacgatctcagctcactgcaatctccgcctcccaggttcaagcgattctcctgccttagcctccccagtagctgagatcacaggtgcacaccatcatgcccagctaattcttttatttttagtgtagcaagggtttcaccatgttggccaggctggtctcgaactcctgacctcaagtgatctgcccgccttggcctcccagactgctgagattacaggcgtgagccactgcacccagcctactgctcttctttttccttttaggatcctagaatttgagaacccgcatgttaccagcaacaacaaaggcacgggctgtgaattcgagctatgggactgtggtggcgatgctaagtatgtttcctttaaagaaagtcacttcatcaaatggtttaaaaatcagctgcccaagccaggggcggtggctcacacctgtaattccagcactttgggaggccaaggtgggtggctcacctgaggagaagagttcaagagcagcctggccaacatggcgaaactccgtctctactaaaaatacaaaaaattagccaggcttggtggcaggcacatgtaatcccagttgggaggctgaggcaggagaactgcttgaacctggaggcggaggttgcagtgaaccctggaggttcaagcggaggttgcttgaacccgggaggcagaagttgcagtgagctgagatcgcaccattgtactccagcctgggcgacagagctggacttctagctcaaaaaacaaaacaaaacaaaaaaatcagctgcccaccaggcaccatgaagttgggcctagtatgtttcctggcacgtatgaggagcttgataaatgatttgctgacatgcattgctttatacactttagtgattaggttatgatgcagttagaagtcatcaaccttggccaggcgcagtggctgacgcctgtaatcccagtactttgggaggctgaggcaggcagatcacctcaggtcaggagttcaagaccagccggcccaacatgatgaaacctcattttaaaaaaaaaaaaaataggggccaggcaccatggctcacacctgtaatccattgctttgggagatcaccagagctcaggagtttgagaccagcctggccaacatagcgaaaccctgtctctactaaaaatacaaaacttagcccagtacggtggtgtgtaccagtaatcaggagactgaggcacgagaatcgcttgaacctgggaggtggacattgcggtgagccaagatcgtgctacggcactcaagcctgggcgacagagccagactcttgtctccaaaaataataataataataataatttttttttaatgaagaaatcatccacctttacaaaaaataaaattgacctgatgtggtcctagctactcaggaagctgaggcagaaggatcacttgggcccacattggaggctgcagtgagctatgatcccacaactgcacttcagcctgggagacagagcaagaccctgtctcttaaaaaaaaaaagtcatcccccaactttttttaaaattttttttatttttttgagacagagtctcgctctgtcacccacgctggagtgcagtggcacgatctcagctcactgcaagctctgcctcctgggttcacgccattctcctgcctcagcctcccgagtagctgggactataggtgcccacaaccacactcccctaacttttttgtatttttagtagagacggggtttcaccgtgttagccaggattgtctcgatctcctgacctcgtgatcgcccgcctcggcctcccaaagtgctgggattacaggtgtgagccaccacgcccagccgtcatagaccaacttttaatactaagatattctttttaaagtccacagttagaaaccagaatgacctaactttccctgttgttccttttcttcctcgcaggtttgagtcctgctggccggccctgatgaaggatgctcatggagtggtgatcgtcttcaatgctgacatcccaagccaccggaaggaaatggagatgtggtattcctgctttgtccaacagccgtccttacaggacacacagtgtatgctaattgcacaccacaaaccaggctctggagatgataaaggaagcctgtctttgtgtaaggaaactggaatttctcttcctcttttgtcttgaatgttttggacacctacatattgtcccatgtcctagaaaccagcagctctgtccagttactgagcacctactgtaccctaggcaattgttaccctctccatgtgagtccactacgtctctactaaaaatacaaaaattagccaggcatgatggcaggcgcctgtactcccagctactcagggggctaaggcaggagaattgcttgagcccaggaggcggagattgcagtgagttgagatctcaccactacactccagtttgtgtgacagggcgagacaccatctcaaaaaaaaaaaaaaaaaaagagaaaagaccgggtgcggtggctcagacctgtaatcccaacactttgggaggccaaggtgtgcggatcacttgaggtcgggagttctagaccaacctggccaacacggtgaaaccccatctctactaaaaatacaaaaattagccaggggtggtggtgcatacctgtaatcccagctactcaggaggctgaggcaagagaatcacttgtacctgggaggtagaggttgcagtgagctgagattgtgccattgcactccagcctggacaacaagagtgaaactctgtttcaaaaaaaaaaagagcagaatacagagtgggaaaatccttgtagctattcttgggtacaactaggggggcactctttctgaaagaacttttctggagaaaaacctccaattcacataacacacatcccagaggtgacacagtcatcctgaaaaagaactcacaaaatattcagaaacaaaatgagaataatagagaatctattcctttctggtttaagaacagaagacctggaaagtggtttgtaaggttttcatcctgtcgccagggggcagtatagcaaacccattctctgttctctggtgtcaagaagacaacttgatctgtgaacttcagaaagttaaatttcttctagaagtttcattgggagctataaagggcccttcatggaaactctttgcctaattaaccttatcttcattttcaagcgccacccttgaacaagctgaagctggtgcactcaaacctggaagatgaccctgaggagatccggatggaattcataaagtatttaaaaagcataatcaactccatgtctgagagcagagacagggaggagatgtcaattatgacctagccagccttcacctgggactgccacatccccagtgaaatcagcatgtttctcggtgcagatctgaaatcacatccagctcctgatgttttcttctccctctgactgcagaggaagtgttcctacctgcaggaaggcacctgtcacacagggcgttcactcagaccatctgtgctctgccctgagttcagttgagaaaatcctattatcaaatttggatttcctggccccagaacttcccaaagacctgtaaaatggagggatttaccacctcacatatgtccagttaaacagtttgtggacttgtaaccgtcgcagcccaatgatacaacagtagtttaatcacgtgtattggcttgaatgtgattttcattccttgattcacccaacaaataccgactggctgagcacctgctgtgtgtgcactgctgttctagctgctgaccatagacagcataaatgaaaaagacagaaattcccaccttcgtggaactctccattttcctaaatgttaggttggtgcaaaactaatcgtggtttttgccatttttaatttttaatggcaaaagccactattacttttgcaccaacctaataggccgattcagaaacttgagtgcaatgtcttggatatgcaaaaaagaaaatcaaaacgcattcttcattctctataagagttctaggcggggcgtggtggctcacacttgtaatcccagcactttgggaggccaaggtgggcggatcatgaggtcaggagatcgagaccatcctgaccaacgtggtgaaaccccatctctactaaaaatagaaaaatcagctgggtgtggtgccgcgtgcctgtaatcccagctacttgggaggctgaggcataagaattgtttgagcccgggagacagaggttgcagtgagccaagattgcgccactgtactccagcttgggcaacagagcaagactccatctcaaaaaaaaaagagttctagcccaggagcggtggctcacacttgtaatcccagcactttgggatgctaaggcaggcggatcacttgaggccaggagttcaagaccagcctggccaacatggcaaaatcccatctctactaaaaatacaaaaattcacagggtgtgttggcacacgcctgtaataccagctactcaggtggctgaggcataagaattgcttgagcctgggaggcagagattgcactgagccgagatcgcgccactatactccagcctgggcaacagacatcctgtctcaaataaattaaattacattaaatgtttaagaagaagtctaaataagtttcatatgctgccctccctcagataatgagggaacctggggtacttaaaatgccaaatgaacgtatacttgatccttattcatagattttgtatttgagaatttgcctactcactaaaatatgtttgtaacccccaaatcaatactgtggcactttctcagttattcgcagacacacagagacaaaaaatttgaagtgcctggctgggcgtggtggctcacgcctgtaatcccagcactttgggaggccgaggcaggcggatcacaaggtccagagatcgagaccatcctggccaacatggtgaaaccccgtctctactaaaaatacaaaaattagctgggcatggtggggcatgcctgtagtcccagctactcagaagggtgaggcagaattgcctgaacccgcgaggcggagactgcagtgagccgagatcgcaccactgcactccagcctggtgacagagc

SEQ ID NO: 1705 - DNA, 367 bp, Homo sapiens
caggagaatcgcttgaacctgggaggcggaggttgcagtaagccgagattgtgccattgcactccagcctgggcaacaagagcaaaactccatctcaaaaaaaagaaaaaagtgccgagtggagtggctcacacctgtaatcccagcactttgggaggccaaggcaggtaaatcacaaggtcaggagttcgagaccagcctgtccaacatggtgaaaccccgactctactaaaaacacaaaaaattagctgggcctggtggcgggtacctgtaatcccagctactcaggaagctgagggaggagaatcacttgaacccaggaggcagaggttgcagtgagccaagatcgcgccactgctctccagcc

SEQ ID NO: 1706 - DNA, 2149 bp, Homo sapiens
cagggatcagtctacatcctatttgctggagcagacccgccctgagtctaattgacacaccaggtgggtttatgggcttctccttcctcccaagcatcccacagccgcgttgcctattgtctttgtggcaagtcttgcccggcagcctagcttcagagcaatgtaagtggttgctgttatacccttctacccaccatgtgctggaaagaggagcatcatgactaaaaggcatgactcatgttctaatccatggcactactgatcctacttttctgcattttaaagtacaaacagctggatattgctgaagatggctcagggggtcaaggacaaatttcacaaatgtgacctcattctccaggctgcctgtttatcctggaggttgatcttggacttgggaccatttaaggttgcctatcttcaaagtgctcagcttggctttttaattctatactcctaaatctttgacagctgtgcatcaacaagctttcaaggtaactgaagcctagggcagctttctgccctctgttactggtgaatgtttttgcctgttggaaggacgttgcagctacaggcagactcccaccatccaccaacggccttattgtcaatccatagtcgtgtgctgactgcaaagtggcctgagttttttgcatatcttgtgagatcactatgggaacgcagtcattataatacagcagttcctgtcttgaggacttttgatagttttatttcttacagtttcatttcctattgatacaaaagagactcttggtaaccaaaaataaatgtaaccagaaatgtcggattctttgtttcatatatgaacatgattttgtaatgtaaattgaataagcccagatctattatgcaactatatactctcgtaacaagtgagtcacagaagcctccgtcaacactgacatattgatgaccttaagaagttagtgattacctatgatgtacaacaaacaaggctggtagctgccagcagaaactaggcataactacttctagtaagtactactactagttctaaaatttaaattaaatcagctcacaccttattttgtgctgctaccactaaaatccaagccaccatgacattatcactaacctggactactaactcatctttccgctttcactctgaccccctccattcattttccctggtgaagctagtgtcatcttataagtaaatcagatcatgtcattcatctcacaactcatctgctttccatctcaccgcaggatagaatccaaactcatcaccatggtctgtgagaccccctgtgatctggcctgcctgactctccgatctcatggcattaccactcccttccctcttgtgatgatctgtccgcaacgactttgctgtttctcatgcctggcccactatgtgcagacatgcaggttgtacaatgcataactccaagagaggcattcagtaggctgcagggtgaatgatgcccttggaagtatgtagtgtggtgaccctggtcacacgcacagctctttcctaccacaaagccttggcacttgctggcctttctgcctggacatccatctgaagattttttgcacagctggctccttcttgtcattcccttgacaaatattccaccaaacactactccataccagggaggctccataccaggcaggaccagctatatactttgcaggtcccagtgcaaaatgaaaaccagggccccttgttcaaaaagtattaagaatttcaagacggtgacagcagaacattaaactaagcatggggcccttctcagtgcggggccctgtgggacaacataggtcacacctccatcaagatggtaagggtttcacatgtattcatgaactcaattgtattttaaagtttagtagaaattgcacaattaataactggttagtgtatatttacctctgcctttggaagttaaagtttttttttttttgaactaaaaattccttaagtgtaatttcatccttgaaaagtcaaagatttgttgttttggcatattgtcaagtttttaaaatttaaaatacagttagttcaaaatatattcacagctttcattcatgagacatttataaatattgggttataaagttccacatttagtatttaactcaaaaaaaaaaaaaa

SEQ ID NO: 1707 - DNA, 2153 bp, Homo sapiens
cagggatctgtcttcctcctatttgcttgagcagacccgccctgagtctaattgacacaccaggtgggtttatgggcttctccttcctcccaagcatcccacagccacgttgcctattgtctttgtggcaagtcttgcccggcagcctagcttcagagcaatgtaagtggttgctgttatacccttctacccaccatgtgctggaaagaggagcatcatgactaaaaggcatgactcatgttctaatccatggcactactgatcctacttttctgcattttaaagtacaaacagctggatattgctgaagatggctcagggggtcaaggacaaatttcacaaatgtgacctcattctccaggctgcctgtttatcctggaggttgatcttggacttgggaccatttaaggttgcctatcttcaaagtgctcagcttggctttttaattctatactcctaaatctttgacagctgtgcatcaacaagctttcaaggtaactgaagcctagggcagctttctgccctctgttactggtgaatgtttttgcctgttggaaggacgttgcagctacaggcagactcccaccatccaccaacggccttattgtcaatccatagtcgtgtgctgactgcaaagtggcctgagttttttgcatatcttgtgagatcactatgggaacgcagtcattataatacagcagttcctgtcttgaggacttttgatagttttatttcttacagtttcatttcctattgatacaaaagagactcttggtaaccaaaaataaatgtaaccagaaatgtcggattctttgtttcatatatgaacatgattttgtaatgtaaattgaataagcccagatctattatgcaactatatactctcgtaacaagtgagtcacagaagcctccgtcaacactgacatattgatgaccttaagaagttagtgattacctatgatgtacaacaaacaaggctggtagctgccagcagaaactaggcataactacttctagtaagtactactactagttctaaaatttaaattaaatcagctcacaccttattttgtgctgctaccactaaaatccaagccaccatgacattatcactaacctggactactaactcatctttccgctttcactctgaccccctccattcattttccctggtgaagctagtgtcatcttataagtaaatcagatcatgtcattcatctcacaactcatctgctttccatctcaccgcaggatagaatccaaactcatcaccatggtctgtgagaccccctgtgatctggcctgcctgactctccgatctcatggcattaccactcccttccctcttgtgatgatctgtccgcaacgactttgctgtttctcatgcctggcccactatgtgcagacatgcaggttgtacaatgcataactccaagagaggcattcagtaggctgcagggtgaatgatgcccttggaagtatgtagtgtggtgaccctggtcacacgcacagctctttcctaccacaaagccttggcacttgctggcctttctgcctggacatccatctgaagattttttgcacagctggctccttcttgtcattcccttgacaaatattccaccaaacactactccataccagggaggctccataccaggcaggaccagctatatactttgcaggtcccagtgcaaaatgaaaaccagggccccttgttcaaaaagtattaagaatttcaagacggtgacagcagaacattaaactaagcatggggcccttctcagtgcggggccctgtgggacaacataggtcacacctccatcaagatggtaagggtttcacatgtattcatgaactcaattgtattttaaagtttagtagaaattgcacaattaataactggttagtgtatatttacctctgcctttggaagttaaagtttttttttttttgaactaaaaattccttaagtgtaatttcatccttgaaaagtcaaagatttgttgttttggcatattgtcaagtttttaaaatttaaaatacagttagttcaaaatatattcacagctttcattcatgagacatttataaatattgggttataaagttccacatttagtatttaactcaaaaaaaaaaaaaaagga

SEQ ID NO: 1708 - DNA, 13216 bp, Homo sapiens
tggcattcagcaatataaaaagggaggtggtgccgcaggaaagggtggaactggaaacactcctggtttcttacttttctccaaggactcctagaagtaccccaccccacccctgctccttggaggacaacgtgatcactgtattcagctccatcaagaatggtccaggttcttctagatgatctgcacaaatggttcctctcctccttcctgatgtctgccattagcattggaataaagttcctgctgaaaatccacatctcccctgggtccggtgttctggaagtgagagagacaatgtcacacttcaaggaggcagctctctagacaggaaggttattcacgtcccatgtcaagtctagctagagttcagagcaattgagaagtgcaattttatctcctgcctttcattctataccctgcttctgaaccatcgtgttcaactgtgaaactcacactttggtgaccctgactccaaaacttaatacacccaaggtcagccccagtgatctgcttcatagccaggactttgggtgggtcttcccagggagtagggcaccctcagagaatgtggctttggacttcatcacagctggggccttttgtgtcacttcagatctaaacttgtaaccgtgctagatctgcttctaacgtgacaacatcacgaaccacgagtccagaagcctaatccataatcctccctcctcatgacgaagtctcatgctctgtgctcaacatggttagctgcacaagatgtaaaccaaagcttcactgaaccctcgacccaaatcggtaactcaagtgcatcaatcataatgaacctccccgaactcagtatttatgattatttttgaggcagggtctcactctgtcgcccgggctggagtgcagtggcaggatcagggctccctgcagccccgacctcccaggctccagcgatcctcccgcctcagcctcctgagtagttgggagtagagatgcctcccacatcgcctggctaatttttgtatttttgtggagaggggatctcgccacgttgcccaggcttgaagccagatcaagcaattgggttccttggatttccgaaatagaccccaatattctgcctttaccccggaggatgcagatgtaccttctctcaggccgatgacctcaggcctccacggtccctggagctctaggaaaggtgggcgcgatctcgcgcccacacccagtgctctgggtcataagcctggatctggaaaaacaaacgcgctttgagaagacggggactccccaggatacccctctctcccctcgtccagcctccagcccacccgattcctccccacatcctccacgtccccaggccccacccacctcttccaactcctccagggaaacccaagccctgcagcgcatggaacaaaagaagtggaaccgatacttccggaacaaggctatctgagagcagttcttcctggccctcgggttcatgtaacggcataactggaaccaaagctcactgagcaagggtatatgagagcgggtctcctcgtacaggaagtagaagatgttttgtttgggggcctcgtcgtcctcctccatgtcattggccagatagctgaggacagaaatcaggttgctgctcaggggcaccaccaggagagacctccggctgaggtcagcttctcagagaggaaggtaagggaccgtccctagctcaggactggcacccaccctgcagagagccacgccttcctcaggagggctctgctggacagagacctgatcaagggcgtctcccactccttcaggatggagacaaaaacccaactggtgaccaagagtggtggcttatgcctggaatcccagcacactgggaggccgaagcaggaggatcacttgaggccaggagtttgagacaggcctgggcaacatagcaagaccctcgtctctattaaaaatataaaaaatacgccagacgtggctcatgcctgtaatcccagcgctttggaaggctgaagcaggtggattgcttgagaccaggagtttgagaccagcctggtcaacacagagaaaccccatctatactaaaaatacaaaaatcagcctggtgcggtggcacacccattagtcctagctactcaggaggctgaagcataagaattgtgtgaacccaggaggcggaggttgcagtgagccaagattgggcccctccattccagcctgagagacacagcaacactcttgtcttgataaataaataaataaataaataaataaataaataactgtccaggtgtggtggtacagccctgtagtcggagctaatcaagaggctgaggtgggaggatcgcttgagcccaggatatggaggctgcagtgagctatgatctcaccactgcactccagcttaggggacagggcaagtctgtctcaaaaaaaaaaaagcaattgaatacactgatattttgccaggaccctgccttctacaggcatctagtctaatgggactgggagtaatcaggggagatgacctaatcccaatgtcacattataataggatgtaactggagagctacgggcatgcagaagttggaagacgagggaaggcatcacagaggctgtgaggtgaaccgacttcaaggaatgggtccttcccttcagagccacatgtgtgcgggacacccagacagaaaacacaaatgcaaagtcaagtggagggcatttggaaggagcagtgaagccaagccaggaaacaccaagatggcgagccagtgtggttgtagagattgtagagagggtggaattggcactgtggaccctggcctcgatagagaaagacatcagctaaggaagttgttcaggtgggcagtgaggttgtcgtgctttggaaagatgttcaggctgcactaggaagccccttggcttggggagagactccaggaaaccccagcagggagcatttgacagtggattcgagtgatgcaagggggacctggactgtgacctctgtcacgggaacccggaggaggctgatggcttttgcggttgatgtgggaaggagagagagagaacaaccggaaacgtctgcttgctgggggaagtgtcatgtccgctcctccgctccttttcttctccccttaggagcggttcatggttccttttgttttttgttcttttttttttttttttttttgagactataatcctgtcttttttgtacacagagtaaagaggacaaataggtgaaagaataaatgaaaggctggaatcccacttcccccgctgtcccagggcattggatattgacggataggaggcagcaaaccactcacagagccaggaagaaatgaatgcgttggtattgccaggaggggaggccggcccggctgaaatacgctatgaccatagccaggagatactgatggagagaaaggaacacagagagggagaggtcacatcttgggagaggaagattgtggatatagtggaatgggggtctggggaggggttgcccatcagagaagggacctcagtgttggggtgactgtgctcatgtggaaattgcggggtggaggggtattcgaaggtcggatgcaaatccgagaagccggaggaagggttttcggtgatgctcccaggatggtgggctccgatgggatctttggagggggtgtgtctaggtcggctggtgtcaggagggtcttttgtgtgccaggcagagaactgtcccaaggagctgagagtagagggcccaggagcttcagggctgcagccagactgtggcccagggctcagatcccaaaggacccataggagaggcaggggccactcattcactctgcaagagaccagcagaatcctgacggagatgctgacaaatcataaaaagacaaagaatagccgggagtggcagctcaagcctgtgatcccagtactttttgagaggtggagacaggaggatcatgtgagcccaacagttggagaacaacctgggcaacacagcgagaccctgtttctaagaagatttcaaaaatgagttgagcatggtagcatgtgcctagtcccagctcctcaggaggctaaggaaagaagattgcttgagcccaggaattagagtgagctatgatcatgccactgtactccatcctggggagcagagctggactctgtctcagaaaaaaaaatgtgtgggtgccaagactcaagaccatgggagctggtcagacacagtgctgacgtctgtaatctgagcactttgggaggccaaggcgggtggatcacctgaggtcaggtgttcgggaccaatctggccaacatggcaaaaccccgtctctactaaaaacacaaaaattagccaggcatggtggttcatgtttgtaatcccagctgcttggaggctgaggtgggagaatcgcttgaacccaggaggcatcagctgcagtgagtcaagatcgagacactgccctccagcctgggcaacagagcaagactgtgtctcacaaaaaaaaacaaaaacaaaaacaaaaaaaaactgtaggagcatctggtgggaggtggtggacggagaactgtgggtttggaagctgcgccctctccctggccgtgcgttagaacaggaacacagttacatagagaacaaccttaccttgtccgacaccctcagatctttgtcccaggccaggagtcttttaatgacaggatcctctgtgattagagagcagatgtcagtgtgagaagcaggacagggtttccctgagagcagcagggcagcgaggagaagtgtgcctcccgggggaaagtctcaggattgtggctgcgggtgaggtggatgggagaggggagaatgactttcactgggcaagggagagaggctcctgctctgagactcccctgagaagaggccgaaggaggccctgggtgtgagaatctacaggatgtagagctgggaatcagccaggaccccctccagcagacacggagggaccactgcagagtcataaaggaattcccatcatttcctcatgagacagtcacacatcagggtgtgaccatggccttggtatccctcactatggatggaaacacttaggtttagaaaagtcagtaagaaacattaagtttcagagggcacagctgaaaccacttttttgatttttgattttgtttttctttatttgatttttatttttatttatttattaatttattttgagacagagtcttgctctgtgggccaggctggaatgcattggcctgatcttggctcactgcaacctctgcctcctgggtttaagcagttctcctgtctcagcctcccgagtagctggaactacagggatgagctactgtgcccagccttggtttttcttttgacgcagagttttgctctgtcacccaggctggagtgcagtggtgcagtcatagctcactgcagcctcaaagtcctgagttcaagcaatcctcttgcctcagcctcccaacgtgctgggatctcaggcgggagccacagcgcctggcccaaaaccaagctttcttatcccaagcaccgacctttatcaagtctacctaatcctctgttgtctcctaagtgtccctcatgagtgatcacttcagagtcctcccgcatggagagctcacccactggggcatatttttcccattggaaaagtgtggttattggaagtttcctctttagaaagaacaggattggaggtgctctctggggtgtcctcctaccaagcagcctgttgaaggcctcgtagtactcagggagcacgagcgacactcgccgtcgcttcgccttcatcttgaggccacacagcgtctccgccacccaggtctcctcaggctcaggggcgagctccttctctggctcatcatcagattcatccaaacattccctcttccttttccagccaagggacctacgtggggggctgggatctaccccaggggctgagtaaagaaaccaggccaccgtgtaatgcttctgcaactgatcacgttagaccccgaccccaaaccccaaaccactctccatcctccccagcctcgcagactgctggcttctccaagccacctttctgactttctcctctgctcaaccccatgtgccactccttcccctccccattcttccctctctctgtcctcagaacactgcctcatatccttccctggtccctggctctctgagtccctctttttttttttttttttttttgtttcgagacagaatcttgctttgtcacccaggctggagtgtagtggtgcaatctcagctcactgcaacatccatctcccggattccatttattctcctgcctcagcctctcaggtagctgggattacaggtgcctgccataatgcccagctcaattttgtacttttaatagagacagggtttcaccatgttggccaggctggtctcaaactcctggcctcaagtgatctgcctgccttggcttcccaaagtgctgggattacaagtgtgagccactgcacccagcctgaatttctccattcttcccacacaccctccccaggttctccttcctgacctctgacccttcttttgtttcttctttttttttttttttttttttgagatagcatgtcactctgtcacccagactggagtgcagtagcacgatctcggctcactgcaacctcttcctcccaggctcaagtgattctcctgtcttagcctcccaagtagctgggattataggcacacaccactaccgcctggctaatttttgtacttttagtagagatggggtttcaccatgttggccaggctggtcttgaactcctgacctcaggtgatctgcccgcctcagcctcccaaagtgttggggttacaggggtgagccaccacgcctggcccccttccttcatcttagtcaatcctatgccacctcttcttcctccagtcccctcacctgatggtcccgacacttcatcatccaccacctcctggagggggtaccctgaggtgctccgctgggggctccgctcttcctggggctgcggttgatggctcatcatgatctttcccaaaatctgtcccatctcaccaaacctagtctctgttctgtccttggtcttcttctggacactgctgggatccagaagagtgtgttatcaattctcgaggctgggagaagtcaggagtggagaacagctctgagaagttactgttgtccaactgaactcccaggtgccgacagagtccggtccctccaatcaggaaggtcggaatctctgatgtcatcgctcatgccaacctggcaaccagtttgaaaaaaaacacatgtaactgccaggctgatctcttgtcctggagatcctgggtgaatggtatctcctgccactgtcccaacctcagaccactgtccaaaagcatcttcagggtctccgcatccctctgttccctgtcccagcagaggctgtgtcctctccactcaaagcttgaagcgtgttggggtctcctcttctctgtacatgcccgtttcagagtccagtctggtgggagagggatcaggatgggaaagaaaagtagggtaagcagaaacgatgaaaccttacaagagtgagattatcatgtacaagagatcccaggaacattgacttgatgaaaaagtcacatcagagcactcaatttggcagaggttttctgccgagtgtctactgacattcactgtccgagattctgtactgggggtacacgcgtcctctgccctaaggcatctttgagtccaagagatattttgaggactggaaatcataggaaactgcccatgagttcacacatatttccaatggtgtccccaatttcagggagtccacggatcacctaaagccagcccctccagtttggctaagaaactctatatatcaagttttgtatcatatgtattgctcttaactcagaaaattccaccatttatagcagtggtttatttatttataccattgaaggaaatggtttatttatgaatctatattatggatattctataagatactgggtgtacaaaaagactaagtcgaaaaatctcagctgtgcacagtggctcatgcttgtaatcccatctctttgggtggccaagggaggaagactgcctgaggccagcagttcaagaccagtataggcaacatagcaagagcccatctctaaaacaaaacaaaacaaaacaaaaaattagccaggtgtcgtggctggcacctgtgttccaacaacttgagagactgaggtggcaggaggattgcttgagcctaggagttaggggctgcagtgagctgtgatcgtgacaccgcactccagtctgggcaacacagcaagaccttgtgtcaaaaaatttttttaaattaaatataaaagagtttcatgacattcagagaccatccaaagaacctgtgggttccggccaggcacagtggctcacgcctgtaatcccagcgctttgggaggccatagcaggtggatcgcttgaggtcaggagtttaagagcagcctggccaacatggtgaaaccccatctcttctaaaaatacaaaaaattagtcaggcatggtggtgggtgcctgtaatcccagccactcaggaggcggggacagcagaatggcttaaacttgggaggcggaggttgcagtgagccaaggtcacaccattgcactccagcctgggcaacaagagcaaaactacatctcaaaaaaaaaaaaaaacaaacaaaaagaacctgtggatgagttcccacatggcttcctaacgggctgcggctctcctaggagtctctcgctcatgggaaaggcacaaactgaatgcggaaggaaatcccattgctatggaagtcccattgttaggaagctctgcttttctggagttcaaatttgcattcatgacgctttaaaccgtcagagctgggtgtgtcctcctacaacaaatcactttactctctctcctagttaacaggctttcaaatattagaacatccatgttctgacttcattaaaattgctcttttgtggaatgaaaagctctgatttaacccgtctttaagcctggtatgcatattcctctctgttccggccaccttgtctagacacactacactgaggcagtgcccatcttagatgatgttgatacattgtcaaaaaatgggcaaaccaggtgcggcggctcacacttgtaatcccagcacttttggaagctgatgccgacagataaccagaggtgaggaggttgagatcagcctggccaacatggtgaaacctgtctgtttttctgtaaaaatacagaaacaatgagctgggcgtgggagtgcacttctgtaatcccagctacttgtggggctgaggcaggagaatcacttgaaccgggaaggtggaggttccagtgagccgagatcacgacactacactccagcctgggcgacagagtgagtctccgactcaaaaaaaaaaaaaaaaaaagtgccagacagcccaggtttggtctgatatgttcagaaaaaagcaaaacagtcacctctcaccttttcttttcctgcaatgatgccgtttaatacaacaatggctgtaggtctgcggcagaaatatcattcaagtgaaacagaagggctttcctggctggacacagtggtcactcctgcaatcccaacactttggttggctaaggtgggaggatttcttgcggccaggagttcgaggctgcagtgagctgtgatccaccactgcattccaggctgggcatcagagtgaggcctgtctctaaaaaaacccttcactccccaaaaaaagggattttcaaataccagcctttcagcatgaggatcacatggaggaacattaagacacagatgctgggacccagccctattgattgtaattaaaaaactgaggtgaggcctgatttagctccatcattggaatccattcagatttgaaattctctgagttggacagtgcaagagagatcctaaagaaagcaaagtcactgtggactgaaatgagctggcaaggttttctgagcgtggtgaaatatgatctgggcctcgcttgggagggctgtggccaggccttgagtccgtggctcagtgggaccttctgaaacagcctccaatccgtgcccccacttcatttgctagtggatgaccccctccagcggctttggtgctgatgggaataagtcaacctgcagcggaagttcagcccaagtttcagcccagcagcttctacacacctgtccgtggtctggtcatgctgccatctctgcggttctctgcggagtcgtggtttctgtaccttgaagagaacttcccctctgggacccagaaacccagtgaatcctcaggaaaaaagggaatgaaattactgaagacaactctgtggcggggagatggaaaagaggctctctctctctttttttcctaatattttgagacagagtttcgctcttgtcacccaggctgcagtgcagtggctccatctcggctcactgcaacctctgcctcccaggttcaagcgattctcctgcctcagcctcccgagtagctgagattacaggcacccaccaccactcccggctaatttttgtattttagggtttcgtcatgtttgccaggctggtcttgaacacctgacttcaaatgatccacccgcctctgcctctcaaagtgctgggaatacaggcataagacactgcacccggcctgtttttgttttttagagacaaggtctctgttgccttggctggggtgcagtggtacaatcagctctctgttgcctcctgggctcaagcaatcctcttctctcagcctcccaagtagctgagactacaggtgcatgcctgtagtagatatagcatcttgctctgttgcccagactggtcttgaactcttggtcacaagcgatcctcttgccttggcctctcaaagtgctggaattacacgcgtgagccattgagcccaaccagataagatgatctttaagggcccttcccatggtaccataatccaagtcagcgagactgtggctatagcaagtttaacataaccagatacgctagtattatgggctgcatggtgtgccccccacccctaattcatgtattgaagccatgaccctccagaccttagaggtgaccttattggaaccagagtctttacagaggtgatcaagttaaaatgaggtcactagaggccaggcacggtggctcacacctgtaatcccagcacttcgggaggccgaggcaggcagataatgagcccaagagaccgagaccatgatgtccaacatggtgaaaccctgtctctactaaaaatacaaaaattagccaggcgtggtggtgtgggcctgtagtcccagctactcaggaggctgaggcaagagaatcgcttgaacccggaaggcagagattgcagtcagccaagatcatgccactacactccagcctgggtgacagagtgagactctatctcaaaaaaataaaaattaaaaaactaaaaacctacagtaccgccttttacataatgcaatggtttggtaagcacatgcaccccagggaggtagtggcagattcagtcaaccttcccagcagcgtggagacgcagtcaggcatagcaggtgttgatgtggtttgaacccacagcttggctcaaatccacactcccctacttagtaccgagtgaagccacttaccctctaagtgccttacttttcttttcttttcttttttcttttttcgagacagagtctcgctctgtcacccaggctggagtgcagtggcatgatcttggctcactgcaaacttcgccttccaggttcaagcaattctcctgcctcagcctcccaagtagctgggattacaggcgcccaccaccatgccgggctaatatttgtatttttgatagagatggggtttcaccatattgcccaggctggtctcgaactcctgacctcaagtgatctgtctgcctcggcctcccaaagtactaggattagaggcatgagccaccacacctggccacttttcttatctatatttgttatgtggatgacttgtgttaacgcaaataagatgctgctcgtcatctttaaagaaaataggtggcaacctgttatagcaagtcctgtttttatttgtacttatgaggctttaattaaacgctaagaattaaaatgcacataataatagactttacctcacaaactggcttcaattattcgatgagacttacatgtattacttaaatgaggttaaatttaaccttttaaaaatgatttattgtggctgggcacagtggctcacacctgtaatcccagcactttgggaggccaaggcagacggatcacttgaggccaggagttgaagaccagcctgaccaacacggcaaaaccccatctccgctaaaaatacaaaaattagccaggcatggtggtgcacacctgtaatcctagctactcaggaggctgagacacaagaatcgcttgaacccgggaggcagaggttgcaaggaggtgagatcacaccactgcactccagcctgggcaatagagtgaggctctgccttaaaacaaagaaaaatgattttgggggatgatggggtgtcactatgttgaccaggcttgtctcaaactccttgcctcaagcaatccacccacctcagcctcccaagtagctggaactacaggcgcatgccaccacgcctggctaatatgtgtgtgtgtgtgtgtgtgtgtgtgtgtgtgtgtgtgtgtgtgtgtgtagaaacaaggtcttactgtgttgtttaagctgctctcaaactcctgggctcaagtgatcctcccacctcggcctcccaaagcattggaattacaggtgtgagccacctcactgagccctccacctttcagctgaacgcagaaaagtacaatcttttaacccaaagcgttcctcacacttagggtcaggaagagcccttcatgccctggaggcaactactaaccctctgctaaacactctgactctgggtgtgagaaacacacctactgtgccccacatatttttccaaatacaacttaatttagccttcacgacaaccctggagtgaaggatcattaactttatttcatagatgtggaaactgagactcagaggcaggaaatgacctccttctggaggctgcaaattctttgatgctcctttgatcaacaggtgggagctggccagaggtggtggctca

SEQ ID NO: 1709 - DNA, 39068 bp, Homo sapiens
caggaggcggggcgcctgtgggagccgttgagggcactttcccagtccccgaggcggatccggtgttgcatccttggagagagctgagagctcgaggtgagctgggctcgcggtcgcccctctcgctcgccctctttgagaaccacggcttccgacctccctggaaatggggggaacatggccgaggcgcgtgggaggccgcctcgtggaggccccggagcggcatcctcagcgccccagcgatccggtgcccattaggtgcgccttgaagccgaggcaagctccttcggggtgctgggctgcgggcaaagaattcggccctgtgaagagttgggttcggcctgtctcaggccctgcccacatcccatcacagggccgtggacttgaagccggaacgtgaaatccccatagactgaatgcatttcctttctacctgttctctctccccttttatttttatttttatattattttatttttaatttttattttatttttttgtagagacggggatttcgctatgttgcccaagctggtctggaactccggagctcaagcagtccgcccgccttggccccccaaagctctggaattacaggcgtaatgcactgtgcctggccttttaaaaaaaaattgaggttattttggggacagtagagcgtccagacacatcctaatttgcgtagctgctcagttttaaaaaatgcaatgcatttttacctcttagggtatgtgatttctggctggtaagctacaccgaatcttggctagcacagttgaattccatgtcagatttgtaaacgcaaatttgctctctgcatttaaatatattagatatatttaggtaactacatttaaatgtattgagacatttaaatacacttgccgtctgtatctaaatatctgaagtggaccaggtgcggtggctcacacctataatcccatcactttgggaggccaaggcaagtggatcatgaggtcaggagttcacgaccagcctggccaacatggtgaaatcccatttctactaaaaatacaaaaattagctgggcgtggtggcaggcgcctgtaatcctagctacttgggaggctgaggcaggagaatcgctggaacccaggagacagaggttgcagtgagctgagattgcaccactgcagtctagcctgggtgacacagcaagactccatctcaaaaaaaaaaagaaaaaaaatcagaagtgaacctgtagcctgtagtgtgttgccaaataaacttatttttagagatacttctttccattttctgtgaggtcatctgcagtttcacatggtagacagacttaggtgagattcttagcaacatagaatgaacagtaaagaggtttgtttatttcacaagggtttattgaaggcctacgatgtgttaaatgctgtaggaaatacccactaatttctcttttcatgtaggtttcccgccttctcttaacgagtgatcaattaaactgtttactgggaacttgctaagttaatgaacacacgggatacattctttggatgagcagacattgggcagaggggcaagaggagagcagtttagacagagacctgcttatacactgtagtgtctaagagagcttgtgatgttcaggaaacagttgttcactgtgctgcaatataggggacggccagttgcggtggctcacacctgtaatcctagtgctttggaaggccaaggcgggcagatcacctgaggtcaggagttagaaaccagcctggccaacatggtgaaaccccatctctactaaaaacacaaaaattagctgagtgtaatggtggatgcctataatcccagcaacttgggaggctgagacaggagaatcacttgaacttgggaggtggaggttgcagtgagccgagatcatgccattgcactctagcccaggtgacagggtgagactctgtctcaaataataataataataataataataataataataataataataataatgtaggggacttgatgaagggaaaggatcagagagattctgaaaagaaggtagtttggggcccagtgatgactagattttaagtttcatatagtaggaagtggggcactagtaatttttcaagcagaaaaattatttgaccagattcgtgatttcaaaaatagctctggtgatagagtggaggatgggttggagcagggaataaggggaaatgaaaccgttataaaactcttaaagtgggctgggcatggtggctcacgcctgtaatcccagcactttgggaggctgaggcgggcggatcacgaagtcaagagatcgagaccatcctggctaaaacggtggaaccctgtctctactaaaaatacaaaaaattagctgggcatggtggtgggcgcctgtagtcccagccactcaggaggctgaggcaggagaatggtgtgaacccgggaggcagagcttgcagtgagctaagatcgtgccactgcactccagcctgggcgacagggcgacagagcaagaatccgtctcaaaaaaaaaaaaaaaaaaaaaaaaacctcttaaaacaagtacagcaagaactttgagggtctttgctaagacagcagctggcagcttcaatttggagtagggtatcaaaggcaactgtgtataaggaatagttatataactggtatccaatttctgagatgattttgacttaaacattgtgtatttcccagcatactgttggtttttctaattatgtgggaaattatgttgcttttacttttttttttgctcattgcccagcctagggtgcaatgctgcaatctcagctcactgcaacctccgcctcccaggtttaagtgattcttctgcctcagcctcccaagtagctgggattacaggcgcccaccaccatgcctggctaattttttgtatttttggtagagacagggtttcacgacgttggccaggctggtctcaaactcctgatctcaagtgatccacctgcctctgtgtcccaaattgctgggattacaggcatgagccaccgcaccggccatgctttcagttttcaagaaagaagacaccattattgccaaagattttggtaatttgagagatacaatgtatgttttctccatgtggatactagatagtaaggatgtgttgaatttgaagtgtctatccagaagtattttgggtacttgtttaaggattgtaaaacaatgtttccatttctggatataataaatgtatttgttaatataataaatgaatagattagacccataaactatttgcagtgttgagtcatttcccacagttaaaatcaggatgaaaatatatagctgaatacctgctttgtttcttgtaactgatttctttagtacagaacctgctaaggccatcaaacctattgatcggaagtcagtccatcagatttgctctgggccggtggtactgagtctaagcactgcggtgaagaagatagtaggaaacagtctggatgctggtgccactaatattggtaagtttgggagagttttaagccacaagaaatgatcagtgaatgttgttgtagtcaagaaacatttgttattgaaataagactatcaagtgttgatgtagtaataaactattatttttaagttaaagttagcacctattatgtgcctagtacttagctaggtagtaataataataacgacagcttttcttgtgttcttatggtgtgccaggcaggtgttatgctaagaattgcacagaaatatctcatttaatttgcagaatagctgggcgtggtgtctgacgcctgtaatcctagccctttgagaggctgaggtggggggattgcttgaagccaagagttcaagaccaacctggccaacatggggagacctcgtctctattaaaaaataaagcaggccgggtgtggtggctcacgcctgtaatcccagcactttgggaggccaaggcgggtggatacctgaggtcaggaattcgagaccagcctgtccaaaatggtgaaactctgtctctactaaaaatacaaaaattagccagacctggtggcagaagcctgtaatcccagctactggggaggctcaggaatgagaattgtttaaatttgggaggtggaggttgcagtgaaccgagattgtgccactgcacgccagcctggggacagagcaagactctgtctcaaaaaaataaaataaaataaaataaaataaatcctggagtagtggctcacatctgtaatcccagcactttgggaggctgaggggggctgatgctttgaggtcaggagttcaagaccagcctaaccaacgtggtaaaaccctgtctctactaaaaatacaaaaattagccagatgtgatggtgcatggctgtactctcagctcctcagaaggctgagggaggagaattgcttaaacctgggaggtggaggttgcagtgagccaagatcgattgtgccactgcattccagcctgggtgacaagagcaaaagtccatctcaaaaaattaaaaaaaaaaaaaaaaaggaaagaaaaaaaagaaaatgacaaaattaaaaaaaaattattaatctgccaaataactttatgagatagaacttattacctccattttacagttgaggaaattaagggacagtaaatttcctttttttgagattataaagctaataaaatagaatctaggaagtctgattccagaaccagttctgttttttttttctttttttttttttttttgagatagagttttgctcttgttgccgaggctgcggtgcaatggcacgatctcaactcactgcaacctccacctcccaggttcaagcgattctcctgcctcagcctcacaagtagctgggattacaggcatgcaccaccacgcctggctaattttgtatttttagtagagatagagtttctctacgttggtcaggctggtctcgaactactgacctcaggtgatccgctcgctttggtctcccaaagtgctgggattacaggcatgaaccactgcgcccggcccccgttctccttactgggtatgttaaaattatttctttcaaaggaaaaggctggtcaaagtgcaacggtctttacaactaattgatcacaaccagttacagatttttttgttccttctccactccaactgcttcacttgactagtgtaaggaaaaaaaaaagaggaaagaaagaaaatgctaaactatttaatctgggctagtaaatggccagaaagaactttataaaaatgaaatatacaaaatgacactagtatgtttaactaaaggtatagttacgacacttaaatttgcacgttataaataatatcaatataaaagctgatagcgtgggtccatttttaataaatatataaatattttaaactttctagatctaaagcttaaggactatggaatggatctcattgaagtttcaggcaatggatgtggggtagaagaagaaaacttcgaaggcttaagtaagttaactttctaatcctattacaaaataattgggccacatgtcttagaattttgagtaacactgtcttgggaaacacaaaaacagttttttaaagccagttactagatatcatgtatatttgttgttatagcacttgagatatcttagtccttactttacagtctctttcagctctgaaacatcacacatctaagattcaagagtttgccgacctaactcgggttgaaacttttggctttcgggggaaagctctgagctcactttgtgcactgaggtgagaaaatatttttatccattcacttgaccccttagaaaaacctctctgaaaattaattggaatcattattatttacaattttctatctcaatatctcagcttctagcttctgaattctgttttgtctcactgccaatctaagtcctagtacttctgaaatgtgagcaataaatgaatgaaatgaagcaaatagtattgtttaaaaaattggttacccttattaaaacagtaacttctcaatttgaacataacatatagataataaatgatagttaccattggttttcattatcaatttttagggaaacatttcaccaaagcactatttaattacagcacagatactaaatttttataaataattacatgcacacacacatatatatacatatatatacatatatatacatatatatatacatatatatacatatatacatatatatacatatatacatatatacatatatacatatatatatacatatatacatatatatatacatatatacatacatatacatatatatacatatatatatacatatatatatacatatatatgtatatatatatttttttttttttttttagacagagtcgcactctgtcacccaggctggagtgcagtggcacagtctcagctcactgcagtctctgcctcccaggttcaagtgactttcgtgactcagcctcctgaagagctgggactatagcgtgcaccaccactcctggctaatttttgtatttttagtagagatggggttttgccatgttgcccaggctggtctggaactccaggcctcaagtgatctgccctccttggcctcccaaagtgctggaattacaggcacgagccaccgcaccctgccctacatatacattttaattataatatcttttggattctttaaaaaaaattttaaaaattttaaaaaattctttaaaaaaattcttttaaaaaattttgtttgaagagtaataacaaaacaaatctctatttgagaatcaataaatcttgagatcatttatggttttgcaattcaacctgaaaaatgaagtcaaagcttttatcaaaacaaagcatgtttagtgctctctgtctcactgtcttttagatgccagaccttagattttgtgatgactcctcaaccgtttagatctcggttatctcagagggatcatcagctttttaagaaaattttgagagaaaagcaagtgaagaaaagagtagtcagtgcccaacatcatggatctctcactgaacacaccatgcctggtattctctcacagtgatgtcaccatttctacctgccacgtatcggcgaaggttgggactcgactggtgtttgatcacgatgggaaaatcatccagaaaaccccctacccccaccccagagggaccacagtcagcgtgaagcagttattttctacgctacctgtgcgccataaggaatttcaaaggaatattaagaaggtacagtaaattaatcctggttttcaagagtattggttaatgcacatgagcaaaagatttactaaagatgtttattcttcagttgattctcttcccataatttattgagaaatgctttatttgcatttctcattaaagacttaacttcaggatgatttacttttttctttttatcacataatgtttattaggactgggaaacatagtgagactctgtctctatgaaaaattaaaaaaaaaattgactgggcatggtggcatgcacctgtagttccagctacttgggaggctgaagtgggaggatcacctgagcccaggaacttgagactgcagtgagctatgattgcgtcactacacttcagactgtgagacagagtaagaccctgtctggaaaaatatatatacatatatatacattttttttattttttatttttatctttttttgagatggagtctcactttggcgccctggctgcagtgcagtggcgcgatctcagttcactgcaacctccacctgccaagttcaagcgattctcctgcttcagccttctgagtagctaccattacaggcgcgcgccaccacgcccggctaatttttgtattttcagtggagacggggttccaccatgttgtccaggctggccaggctggtcttgaattcctgccctcaggtgatccgcccacctcggcctctcaaagtgctgggattacaggcgtgagccaccatgcctgaccttatgtacttatatttttatgagaatatttctcttggttttctgataaatgagttactggaacccttatgaatttgaatgcaaatgaaacagctaaatgttatataattgttgtgtttaaaaagcagattataaaactgtctgtattatatgattacagttttataaaaacaaaacaggcctaaatgtgtatagtataaagactgaagagtcagcacttccatgttctcagcggttatccttggatgtgagatctcatgcactttttgctctcttctttgtgcctttccattttgcatgcgtatttcttataatctaaaaagttacttaaacatatgcagctaaaaactttttttacttgtaaagcgtttggtgctaattttaacttttttttttagacggagtcttctcactctgtcgcccaggctggagtgcagtggtgtgatcttggctcactgcaacctccgcctcctgggttcaagtgattctcctacctcagcctcccaagtagctgggattataggtgtgtgtcaccacacccagctaatttttgtatttttagtagagatggggtttcaccatgttggccaggctggtcttgcacccctgacctcaagtgatctgcccacctcagcctcccaaagtgctgggattacaggcgtgagccaccacgcctggcttttttttttaaagcttttttgtaagtcagccagcaagaacacaggaggaagtactcaaatctcccttacacagctgggggctgtgtcaggttttataagcatagggtaatgaggtgtgatttgattggatcttgcaataaagtaatgctgggaggtgtgatctgactggatcctgccatggggtgacaccaaaactcaatctgattggatcctggctcctgcctgggggtgtctggttcttaaatcggtccgagctcttcaggctgagctcttaggttccactccacggtggcacgcgtggttaacctgggcatgcacagggtacatgaccttcaacctgcaggtcgatggcaattggaaaacaactgacaacttcattacataaaagttgaactgattcgggtgcggtgactcacgcctgtaatcccagcactttgggaggccaaggcaggtggatcacctgaggtcgaggagttcaagaccagcctggccaaaatggtgaaaccccgtctctactaaaaatataaatattagccaggcgtggtggcgcacccttgtaatcccagctaccccagaggctgaggcagcagaatgcttgaacctaggacgtggaggttgcagtgagctgagatcgtgccattgcactccagcctgggtgacaagagtgaaactccatcaaaaaaaaaaaaagttgaactagatttggtctgatgcagttacagatttacaaaccgcgtcccaccctcctgccaacaccttccactcctcattcttgagggattagggatggaggtcatgcttctgtatcgacttcatgctgaccaggggcacttagtcccctaaagtgagaggaatgaaactcttgggcttctgagttcagatgagttctggggtcacccggagtagcttgaaaggctggtattgttgtaatacaagctgaaggtggaagtgttggatcctggaggacaaacagctcaccatccatttaaataaataggaccaaaaagtaacagaacagtggccacgaggggccccaatagaggaagaaaccaggtgaggtgtggtatagtggactcgactgccttctaaatctcagtggttgtccgggtgcggtggctcacgcctgtaattccagcaaaagaagagccgaggcagggtgatcacgaggtcaggagttcaagaccagccgggcaaacatggtgaaaccccgtctctactgaaaatacaaaaattagccaggtgtggtggcgtgtgctgtagtcccagctactagggaggctgaggcaggagaattgcttgaacctgggaggcggaggttgcagtgagccgagattgtgccactgcactccagcctaggtaacagagcaggaccccatctcagtcaatcaatcaatctcagtggttgaactacccttgatatggttcagctctgtatccccaaccaaatctcatgtccaattgcaattcccagtgttgagggagggacctggtgggagatgattggctcatggcggctgacgtcccccttgctggtctcgtgatagtgagcgctcatgggatctggttgtttagaagcatgcagcacctcctgcttcactctctctgtctctcctgctccaccatggccagaaacgtgcctgcttccccttcgccttctgccgtgattgtcagtttcttgagggctccccagccatgcttcctgtacagcctgcaaaactgtgagtcaattaaacctcttttcttcataaattccccagtttccagtagttctttatagcagtgtgaaaacagactaatggacccttctggttgaaggaatgtagccattctgcttgtttaagtatttcctttctattcatctctatttcccgggaggtgtttatccaagtgcaataggagatattggtgactgcagagtcccctcagtgttctgctagtaaatagttgaaggttgatcagtgatctccagcattttcagtctggcatggaaaagcccccatgtaactggtaaaggtatcagtaagcaccaggaggtatctaaatccaccaggagccataggcatcatgttgatgtccatttaccagtcttccctggcaagattctctgaattgtactgccttggccaaaagaggtatgggaggggctgggcacagtggctcacgcctgtaatcccagcattttgggagaccaattcgggtagatcattagaggtcaggggttcaagaccatcctggccaacatggtgacattccatctctactaaaaatacaaaaagtcagcggggtttggtgttgggtgcctgtaatcccagctactcgggaggctgaggcaggataatcacttgaacctgggaggaggaggaggtggcagtgagctgagatctcgccattgcactccagcctgggcaacaagagcgaaacttcatctcaaaaaataaaacaagaagtctgggtgtggtggctcgtgcctgtaatcccaggactttgggaggccaagatgggtggatcatgaggtcaggagttcaagaccagcctggcctagatggtgaaaccctgtctcgagtgaaaatacaaatattagctgggcatggtggcacacacctgtaatctcagctactcagaagtctgagacagaagaattgccaaaacccgggagggagaggttgcagtgagccgagatcgcgccactgcactctagcctgggcgacagagcaagactccgtctcgaaagaaagaaagagaaaggaaattccccagggaagtacctcggcttatttcatgaagaggtactgaaggaagcagaggcatgtggaggacttccccacctcgtgcagctatttgggccgtggcgtctgaaatttcttatttcagagtcacccctttgatgaccttggcagtggactgcagtcatctgtttaggcctctccatggcccgtgtcaatgccgatatttctgtctgttgcacatttgatttccttgttgttggcatttagaaggccccctgtttcccagatcacaccacgggcatggaccgcagagattgcatcttgtgagtctgtagaaacagtcaaggccttgtcctctcttaggtccagagctcaggtgaatgcagattttcccggccatctgtgctgaagtccctgtggggaggctcctggctggtttcctgtaggtagacagctacacatcctgcccttcattggcttcttttcatgaagctcctgctgtctacaaaacatgtctcccttttcttcttgaaccacatctctgttattgaaactctagaagtcagccaggcacagtggctatgcctgtaatcccagcactttgggaggccaaggtgggtggatcacctgaggtcaggagttcaagaccagcctggccaacatggcgaaaccctgtctctaatacaaatactaaaattagccaagcatggtggccactgcactccagcctgggtgacagagcaagactctgtctcaaataaagaaagagaaagtatcatgcttttcagagttctgtgggttgttatggtgaattatcaaacctgaggacgtggtgggaacctccaaatttgcagccagttggtgagaagtacatgcggtctgtggacacccaagcttgcagctgcatctgaagcgagggcagcctagcgggggctggtggccttaacctgtggcatttgatgtaacatcagggagttgacatcagaattacgtcacacaggccaggtgcagtggctcatgcttataatcccagcaattagaaaggcaagataagaagattgcttgagcttgagtctgagcccacagtgagctatgaccgcaccactgcaccccagtctgggtgacagcacaagaccccgactccaaaaataaaaaagaaaaatcacaaagaattgcatggcagagtgcctgtctttcacagcttgaactgttgcaggaactttctttttttttttttcttttgtgatggagtctcgcgctttcacccaggctggagtgcagtggcgcgatctctgctcactgcaggctccgcctcctgggttcacaccattctcctgcctcagcctccggagtagctgggactacaggcgcctgccaccgcacccagctaattttttgtatttttagcagagatggggtttcaccgtattagccaggatggtcttgatctcctgacctcatgatccacccacctcagcctcccaaagtgctgggattacagtcctgagccaccgcgcctggacttttttttttttttttttgagaggggttggggagacatattctctgctagtgattctcctgcctggtctcgaactcctgctgggatcacaggcgtgagccaccacgcccagccacctttagagttttcttaccacctggttttcctctctcaatatctttctctcatttcctgctttaaaactctagcttggggtctgggcacagtagctcatgcctataatcccagcactttgggagactgaggcgggtggatcacttgaggtcaggagtttgagaccagcctggccaacatggtgaaaccttgtctctactatttttacaaaagttagtcagacgtacaggcggatgcctgtagtcccagctacttgggaggctgaggcaggagaatttgcttgaacgccgaggtgaaagttgcagggagccgaggttgtgccactgcactccagcctgggagacagagcgagactgtctccaaaacaaacaaacaaacaaacaaacaaaaaaaccctgtagcttgggatcagccttctcttctgttgtttttctttaaaaaataaaaattaaaaataggcttcaagtgatcctcccgccatgacctccaaaactgctgggattgtaggtgtgagcactgcacccagccgtatgtttttttctacataaaaaacagcacaggattatcttccaaagctaacaaatatgttcaaataaccacaaccccattaaggaaaaatgtcacttgacagcaaataatcaatccagaccacaatatgatcacactcactgtgaaggtgagaaaagttcatctttattatgtttccccaagagatgcactgcactgttctcttgaaaacacacagctcatgtcctcctttagaacacacatcctctttaaagtaacatacaaacatgccaaaacaagataaaaaattccatctgaattctcacatttcaaacatacactaaatatcaaataaaaatttatttttacaagaatttaggggaactaccacatagctataaatgtaatatatatgttaactaagtatcatagataaaaaccatgctcccttcagcagcacgtgtaataatagatacaaagattgaaaggtaaaagatttaggatgaaaagaatcctctcttaaaaaggaaaacaaaattatatgtatgtgtatacaacagttataatacccatcacacagctttatagaaacagcatctattcaaaaataccagtatttccaaaatatttaaaataatatttaaagtaataataatatttaaataaataaatatatttaataaatatttcagtaaataaaataatatttaaataattctatacccatgtttttcaaaataaaccaataaaatagatagtatatattagacgtgttagtatatatatctgagacatgttaaaaatcacaactgaattctcacaagtcagtcacaaacctaaacagcaaataaaaatttctatcaccagaattatgtttttttctggtggggaactaccaatagctataaatagaagagattattatggaagtatcatagataaaaagagtgctcgcttcaggagcacatataataatacagaaaaaaatttaaagataataaaagatttaggataaaaagaattctcacttaaaaatgaaaagaaaattatctttaggtatatataacaactataactctcatcaaaaaactctacaggaacagcatgttttcaaaagtacaacaatttccaaactatttgaaataaacctattaataattcaatggccaacattttccaaacaaaccaataaaatgcatagtgtgcatgaagctatctgttacagtctgtggcactcatatttcacaaagaattctgtgccaatctgagcccctgcactgtgccttcaaatgctcctggactgtggcaaccaagtccataagaaacaggacctccaggttccgccccagggaggttggcattcagcaatataaaaagggaggtggtgccgcaggaaagggtggaactggaaacactcctggtttcttacttttctccaaggactcctagaagtaccccaccccacccctgctccttggaggacaacgtgatcactgtattcagctctgtcaagaatggtccaggttcttctagatgatctgcaccaatggttcctctcctccttcctgatgtctgccattagcattggaataaagttcctgctgaaaatccacatctcccctgggtccggtgttctggaagtgagagagacaatgtcacacttcaaggaggcagctctctagacaggaaggttattcacgtcccatgtcaagtctagctagagttcagagcaattgagaagtgcaattttatctcctgcctttcattctataccctgcttctgaaccatcgtgttcaactgtgaaactcacactttggtgaccctgactccaaaacttaatacacccaaggtcagccccagtgatctgcttcatagccaggactttgggtgggtcttcccagggagtagggcaccctcagagaatgtggctttggacttcatcacagctggggccttttgtgtcacttcagatctaaacttgtaaccgtgctagatctgtttctaacgtgacagcatcacgaaccacgagtccagaagcctaatccataatcctccctcctcatgacgaagtctcatgctctgtgctcaacatggttagctgcacaagatgtaaaccaaagcttcactgaaccctcgacccaaatcggtaactcaagtgcatcaatcataatgaacctccccgaactcagtatttatgattatttttgaggcagggtctcactctgtcgcccgggctggagtgcagtggcaggatcagggctccctgcagccccgacctcccaggctccagcgatcctcccgcctcagcctcctgagtagttgggagtagagatgcctcccacatcgcctggctaatttttgtatttttgtggagaggggatctcgccacgttgcccaggcttgaagccagatcaagcaattgggttccttggatttccgaaatagaccccaatattctgcctttaccccggaggatgcagatgtaccttctctcaggccgatgacctcaggcctccacggtccctggagctctaggaaaggtgggcgcgatctcgcgcccacacccagtgctctgggtcataagcctggatctggaaaaacaaacgcgctttgagaagacggggactccccaggatacccctctctcccctcgtccagcctccagcccacccgattcctccccacatcctccacgtccccaggccccacccacctcttccaactcctccagggaaacccaagccctgcagcgcatggaacaaaagaagtggaaccgatacttccggaacaaggctatctgagagcagttcttcctggccctcgggttcatgtaacggcataactggaaccaaagctcactgagcaagggtatatgagagcgggtctcctcgtacaggaagtagaagatgttttgtttgggggcctcgtcgtcctcctccatgtcattggccagatagctgaggacagaaatcaggttgctgctcaggggcaccaccaggagagacctccggctgaggtcagcttctcagagaggaaggtaagggaccgtccctagctcaggactggcacccaccctgcagagagccacgccttcctcaggagggctctgctggacagagacctgatcaagggcgtctcccactccttcaggatggagacaaaaacccaactggtgaccaagagtggtggcttatgcctggaatcccagcacactgggaggccgaagcaggaggatcacttgaggccaggagtttgagacaggcctgggcaacatagcaagaccctcgtctctattaaaaatataaaaaatacgccagacgtggtggctcatgcctgtaatcccagcgctttggaaggctgaagcaggtggattgcttgagaccaggagtttgagaccagcctggtcaacacagagaaaccccatctatactaaaaatacaaaaatcagcctggtgcggtggcacacccattagtcctagctactcaggaggctgaagcataagaattgtgtgaacccaggaggcggaggttgcagtgagccaagattgggcccctccattccagcctgagagacacagcaacactcttgtcttgataaataaataaataaataaataactgtccaggtgtggtggtacagccctgtagtcggagctaatcaagaggctgaggtgggaggatcgcttgagcccaggatatggaggctgcggtgagctatgatctcaccactgcactccagcttaggggacagggcaagtctgtctcaaaaaaaaaaaaaaagcaattgaatacactgatattttgccaggaccctgccttctacaggcatctagtctaatgggactgggagtaatcaggggagatgacctaatcccaatgtcacattataataggatgtaactggagagctacgggcatgcagaagttggaagacgagggaaggcatcacagaggctgtggggtgaaccgacttcaaggaatgggtccttcccttcagaaccacatgtgtgcgggacacccagacagaaaacacaaatgcaaagtcaagtggagggcatttggaaggagcagtgaagccaagccaggaaacaccaagatggcgagccagtgtggttgtagagattgtagagagggtggaattggcactgtggaccctggcctcgatagagaaagacatcagctaaggaagttgttcaggtgggcagtgaggttgtcgtgctttggaaagatgttcaggctgcactaggaagccccctggcttggggagagactccaggaaaccccagcagggagcatttgacagtggattcgagtgatgcaagggggacctggactgtgacctctgtcacgggaacccggaggaggctgatggcttttgcggttgatgtgggaaggagagagaacaaccggaaacgtctgcttgctgggggaagtgtcatgtccgctcctccgctccttttcttctccccttaggagcggttcatggttccttttgttttttgttcttttttttttttttttgagactataatcctgtcttttttgtacacagagtaaagaggacaaataggtgaaagaataaatgaaaggctggaatcccacttcccccgctgtcccagggcattggatattgacggataggaggcagcaaaccactcacagagccaggaagaaatgaatgcgttggtattgccaggaggggaggccggcccggctgaaatacgctatgaccatagccaggagatactgatggagagaaaggaacacagagagggagagttcacatcttgggagaggaagattgtggatatagtggaatgggggtctggggaggggttgcccatcagagaagggacctcagtgttggggtgactgtgctcatgtggaaattgcggggtggaggggtattcgaaggtcggatgcaaatccgagaagccggaggaagggtttttggtgatgctcccaggatggtgggctccgatgggatctttggagggggtgtgtctaggtcggctggtgtcaggagggtcttttgtgtgccaggcagagaactgtcccaaggagctgagagtagagggcccaggagcttcagggctgcagccagactgtggcccagggctcagatcccaaaggacccataggagaggcaggggccactcattcactctgcaagagaccagcagaatcctgacggagatgctgacaaatcataaaaagacaaagaatagccgggagtggcagctcaagcctgtgatcccagtactttttgagaggtggagacaggaggatcatgtgagcccaacagttggagaacaacctgggcaacacagcgagaccctgtttctaagaagatttcaaaaattagttgagcatggtagcatgtgcctagtcccagctcctcaggaggctaaggaaagaggattgcttgagcccaggaattagagtgagctatgatcatgccactgtactccatcctggggagcagagctggactctgtctcagaaaaaaaaaatgtgtgggtgccaagactcaagaccatgggagctggtcagacacagtgctgacgtctgtaatctcagcactttgggaggccaaggcgggtggatcacctgaggtcaggtgttcgggaccaatctggccaacatggcaaaaccccgtctctactaaaaacacaaaaattagccaggcgtggtggttcatgtttgtaatcccagctgcttggaggctgaggtgggagaatcgcttgaacccaggaggcatcagctgcagtgagtcaagatcgagacactgccctccagcctgggcagcagagcaagactgtgtctcacaaaaaaaaacaaaaacaaaaacaaaaaaaaactgtaggagcatctggtgggaggtggtggacggagaactgtgggtttggaagctgcgccctccccctggccgtgcgttagaacaggaacacagttacatagagaacaaccttaccttgtccgacaccctcagatctttgtcccaggccaggagtcttttaatgacaggatcctctgtgattagagagcagatgtcagtgtgagaagcaggacagggtttccgtgagagcagcagggcagcgaggagaagtgtgcctcccgggggaaagtctcaggattgtggccgcgggtgaggtggatgagagaggggagaatgactttcactgggcaagggagagaggctcctgctctgagactcccctgagaagaggccgaaggaggccctgggtgtgagaatctacaggatgtagagctgggaatcagccaggaccccctccagcagacacggagggaccactgcagagtcataaaggaattcccatcatttcctcatgagacagtcacacatcagggtgtgaccatggccttgggatccctcactatggatggagacacttaggtttagaaaagtcagtaagaaacattaagtttcagagggcacagctgaaaccacttttttgatttttgattttgtttttctttatttgatttttatttttatttatttattaatttattttgagacagagtcttgctctgtgggccaggctggaatgcattggcctgatcttggctcactgcaacctctgcctcctgggtttaagcagttctcctgtctcagcctcccgagtagctggaactacagggatgagctactgtgcccagccttggtttttcttttgacgcagagttttgctctgtcacccaggctggagtgcagtggtgcagtcatagctcactgcagcctcaaagtcctgagttcaagcaatcctcttgcctcagcctcccaacgtgctgggatctcaggcgggagccacagcgcctggcccaaaaccaagctttcttatcccaagcaccgacctttatcaagtctacctaatcctctgttgtctccttaagtgtccctcatgagtgatcacttcagagtcctcccgcatggagagctcacccactggggcatatttttcccattggaaaagtgtggttattggaagtttcctctttagaaagaacaggattggaggtgctctctggggtgtcctcctaccaagcagcctgttgaaggcctcgtagtactcagggagcacgagcgacactcgccgtcgcttcgccttcatcttgaggccacacagcgtctccgccacccaggtctcctcaggctcaggggcgagctccttctctggctcatcatcagattcatccaaacattccctcttccttttccagccaagggacctacgtggggggctgggatctaccccaggggctgagtaaagaaaccaggccaccgtgtaatgcttctgcaactgatcacgttagaccccgaccccaaaccccaaaccactctccatcctccccagcctcgcagactgctggcttctccaagccacctttctgactttctcctctgctcaaccccatgtgccactccttcccctccccattcttccctctctctgtcctcagaacactgcctcatatccttccctggtccctggctctctgagtccctcttttttttttttttttttgtttcgagacagaatcttgctttgtcacccaggctggagtgtagtggtgcaatctcagctcactgcaacatgcatctcccggattccagttattctcctgcctcagcctctcaggtagctgggattacaggtgcctgccataatgcccagctccattttgtacttttaatagagacagggtttcaccatgttggccaggctggtctcaaactcctggcctcaagtgatccgcctgccttggcttcccaaagtgctgggattacaagtgtgagccactgcacccagcctgaatttctccattcttcccacacaccctccccaggttctccttcctgacctctgacccttcttttttttcttcttttttttttttttttttttttttttttttttttgagatagcatctcactctgtcacccagactggagtgcagtagcacgatctcggctcactgcaacctcttcctcccaggctcaagtgattctcctgtcttagcctcccaagtagctgggattataggcacacaccactaccgcctggctaatttttgtacttttagtagagatggggtttcaccatgttggccaggctggtcttgaactcctgacctcaggtgatctgcccgcctcagcctcccaaagtgttggggttacaggggtgagccaccacgcctggcccccttccttcatcttagtcaatcctatgccacctcttcttcctccagtcccctcacctgatggtcccgacacttcatcatccaccacctcctggagggggtaccctgaggtgctccgctgggggctccgctcttcctggggctgcggttgatggctcatcatgatctttcccaaaatctgtcccatctcaccaaacctagtctctgttctgtccttggtcttcttctggacactgctgggatccagaagagtgtgttatcaattctcgaggctgggagaagtcaggagtggagaacagctctgagaagttactgttgtccaactgaactcccaggtgccgacagagtccggtccctccaatcaggaaggtcggaatctctgatgtcatcgctcatgccaacctggcaaccagtttgaaaaaaaacacatgtaactgccaggctgatctcttgtcctggagatcctgggtgaatggtatctcctgccactgtcccaacctcagaccactgtccaaaagcatcttcagggtctccgcatccctctgttccctgtcccagcagaggctgtgtcctctccactcaaagcttgaagcatgttggggtctcctcttctctgtacatgcccgtttcagagtccagtctggtgggagagggatcaggatgggaaagaaaagtagggtaagcagaaacgatgaaaccttacaagagtgagattatcatgtacaagagatcccaggaacattgacttgatgaaaaagtcacatcagagcactcaatttggcagaggttttctgccgagtgtctactgacattcactgtccgagattctgtactgggggtacacgcgtcctctgccctaaggcatctttgagtccaagagatattttgaggactggaaatcataggaaactgcccatgagttcacacatatttccaatggtgtccccaatttcagggagtccacggatcacctaaagccagcccctccagtttggctaagaaactctatatatcaagttttgtatcatatgtattgctcttaactcagaaaattccaccatttatagcagtggtttatttatttataccattgaaggaaatggtttatttatgaatctatattatggatattctataagatactgggtgtacaaaaagactaagtcgaaaaatctcagctgtgcacagtggctcatgcttgtaatcccatctctttgggtggccaagggaggaagactgcctgaggccagcagttcaagaccagtataggcaacatagcaagagcccatctctaaaacaaaacaaaacaaaacaaaacaaaattagccaggtgtcgtggctggcacctgtgttccaacaacttgagagactgaggtggcaggaggattgcttgagcctaggagttaggggctgcagtgagctgtgatcgtgacaccgcactccagtctgggcaacacagcaagaccttgtgtcaaaaaaatttttttaattaaatataaaagagtttcatgacattcagagaccatccaaagaacctgtgggttccggccaggcacagtggctcacgcctgtaatcccagcgctttgggaggccatagcaggtggatcgcttgaggtcaggagtttaagagcagcctggccaacatggtgaaaccccatctcttctaaaaatacaaaaaattagtcaggcatggtggtgggtgcctgtaatcccagccactcaggaggcggggacagcagaatggcttaaacttgggaggcggaggttgcagtgagccaaggtcacaccattgcactccagcctgggcaacaagagcaaaactacatctcaaaaaaaaacaacaaaaaaaaaaaacaaaaagaacctgtggatgagttcccacatggcttcctaacgggctgcggctctcctaggagtctctcgctcatgggaaaggcacaaactgaatgcggaaggaaatcccattgctgtggaagtcccattgttaggaagctctgcttttctggagttcaaatttgcattcatgacgctttaaaccgtcagagctgggtgtgtcctcctacaacaaatcactttactctctctcctagttaacaggctttcaaatattagaacatccatgttctgacctcattaaaattgctcttttgtggaatgaaaagctctgatttaacccgtctttaagcctggtatgcatattcctctctgttccggccaccttgtctagacacactacactgaggcagtgcccatcttagatgatgttgatacattgtcaaaaaatgggcaaaccaggtgcggcagctcacacttgtaatcccagcacttttggaagctgatgccgacagataaccagaggtgaggaggttgagatcagcctggccaacatggtgaaacctgtctgtttttctgtaaaaatacagaaacaatgagctgggcgtgggagtgcacttctgtaatcccagctacttgtggggctgaggcaggagaatcacttgaaccgggaaggtggaggttccagtgagccgagatcacgacactacactccagcctgggcgacagagtgagactccgactcaaaaaaaaaaaaaaaaaaaaagtgccagacagcccaggtttggtctgatatgttcagaaaaaagcaaaacagtcacctctcaccttttcttttcctgcaatgatgccgtttaatacaacaatggctgtaggtctgcagcagaaatatcattcaagtgaaacagaagggctttcctggctggacacagtggtcactcctgcaatcccaacactttggttggctaaggtgggaggatttcttgcggccaggagttcgaggctgcagtgagctgtgatccaccactgcattccaggctgggcatcagagtgaggcctgtctctaaaaaaacccttcactccccaaaaaaagggattttcaaataccagcctttcagcatgaggatcacatggaggaacattaagacacagatgctgggacccagccctattgattgtaattaaaaaactgaggtgaggcctgatttagctccatcattggaatccattcagatttgaaattctctgagttggacagtgcaagagagatcctaaagaaagcaaagtcactgtggactgaaatgagctggcaaggttttctgagcgtggtgaaatatgatctgggcctcgcttgggagggctgtggccaggccttgagtccgtggctcagtgggaccttctgaaacagcctccaatccgtgcccccacttcatttgctagtggatgaccccctccagcggctttggtgctgatgggaataagtcaacctgcagcggaagttcagcccaagtttcagcccagcagcttctacacacctgtccgtggtctggtcatgctgccatctctgcggttctctgcggttctctgcggagtcgtggtttctgtaccttgaagagaacttcccctctgggacccagaaacccagtgaatcctcaggaaaaaagggaatgaaattactgaagacaactctgtggcggggagatggaaaagaggctctctctctttttttttcctaatattttgagacagagttttgctcttgtcacccaggctgcagtgcagtggctccatctcggctcactgcaacctctgcctcccaggttcaagcgattctcctgcctcagcctcccgagtagctgagattacaggcacccaccaccactcccggctaatttttgtattttagggtttcgtcatgtttgccaggctggtcttgaacacctgacttcaaatgatccacccgcctctgcctctcaaagtgctgggaatacaggcataagacactgcacccggcctgtttttgttttttagagacaaggtctctgttgccttggctggggtgcagtggtacaatcagctctctgttgcctcggctggggtgcagtggtacaatcagctctctgttgcctcctgggctcaagcaatcctcttctctcagcctcccaagtagctgagactacaggtgcatgcctgtagtagatatagcatcttgctctgttgcccagactggtcttgaactcttggtcacaagcgatcctcttgccttggcctctcaaagtgctggaattacacgcgtgagccattgagcccaaccagataagatgatctttaagggcccttcccatggcaccataatccaagtcagcaagactgtggctatagcaagtttaacataaccagatacgctagtattatgggctgcatggtgtgccccccacccctaattcatgtattgaagccatgaccctccagaccttagaggtgaccttattggaaccagagtctttacagaggtgatcaagttaaaatgaggtcactagaggccaggcactgtggctcacacctgtaatcccagcacttcgggaggccgaggcaggcagataatgagcccaagagaccgagaccatgatgtccaacatggtgaaaccctgtctctactaaaaatacaaaaattagccaggcgtggtggtgtgggcctgtagtcccagctactcaggaggctgaggcaagagaatcgcttgaacccggaaggcagagattgcagtcagccaagatcatgccactacactccagcctgggtgacagagtgagactctatctcaaaaaaataaaaattaaaaaactaaaaacctacagtaccgccttttacataatgcaatggtttggtaagcacatgcaccccagggaggtagtggcagattcagtcaaccttcccagcagcgtggagacgcagtcaggcatagcaggtgttgatgtggtttgaacccacagcttggctcaaatccacactcccctacttagtaccgagtgaagccacttaccctctaagtgccttacttttcttttcttttcttttttcttttttcgagacagagtctcgctctgtcacccaggctggagtgcagtggcatgatcttggctcactgcaaacttcgccttccaggttcaagcaattctcctgcctcagcctcccaagtagctgggattacaggcgcccaccaccatgccgggctaatatttgtatttttgatagagatggggtttcaccatattgcccaggctggtctcgaactcctgacctcaagtgatctgtctgcctcggcctcccaaagtactaggattagaggcatgagccaccacacctggccacttttcttatctatatttgttatgtggatgacttgtgttaacgcaaataagatgctgctcgtcatctttaaagaaaataggtggcaacctgttatagcaagtcctgtttttatttgtacttatgaggctttaattaaacgctaagaattaaaatgcacataataatagactttacctcacaaactggcttcaaatattcgatgagacttacatgtattacttaaatgaggttaaatttaaccttttaaaaatgatttattgtggctgggcacagtggctcacacctgtaatcccagcactttgggaggccaaggcagacggatcacttgaggccaggagttgaagaccagcctgaccaacatggcaaaaccccatctccgctaaaaatacaaaaattagccaggcatggtggtgcacacctgtaatcctagctactcaggaggctgagacacaagaatcgcttgaacccgggaggcagaggttgcaaggaggtgagatcacaccactgcactccagcctgggcaatagagtgaggctctgccttaaaacaaagaaaaatgattttgggggatgatggggtgtcactgtgttgaccaggcttgtctcaaactccttgcctcaagcaatccacccacctcagcctcccaagtagctggaactacaggcgcatgccaccacgcctggctaatgtgtgtgtgtgtgtgtgtgtgtgtgtgtgtgtagaaacaaggtcttactgtgttgtttaagctgctctcaaactcctgggctcaagtgatcctcccacctcggcctcccaaagcattggaattacaggtgtgagccacctcactgagccctccacctttcagctgaacgcagaaaagtacaatcttttaacccaaagcgttcctcacacttagggtcaggaagagcccttcatgccctggaggcaactactaaccctctgctaaacactctgactctgggtgtgagaaacacacctactgtgccccacatatttttccaaatacaacttaatttagccttcacgacaaccctggagtgaaggatcattaactttatttcatagatgtggaaactgagactcagaggcaggaaatgacctccttctggaggctgcaaattctttgatgctcctttgatcaacaggtgggagctggccagaggtggtggctcacacctataatcccagcactttgggaggccaaggtgggaggattgactgaggccaggagtttgaaactagcctgggcaacatagcaagacctcatctctacaaaaaatacacaaattagcagggtgtggtggtgcacacctgtagtcgcagccactcgggaggctgaagtggtagcattgcttgagcccaggaggttgaggctggagtgagccatgatcaagccactgcactccagccgaggagatggagatagaccctgtctcaaacaacaacaaaaaaataggtgaggatcagccaggcatggtggctcacgcctgtaatcctagaactttgggaggccaaggtgggaggattgcttgaggccaggacttcaagaccagcctgggcagcctagcaagatcccatcccttaaaaaaaagtttttaggctgggcatggtcactcatgcctgtaatcctagcactttgggaggccaaggcaggcgggttgcctgagctgaggagtttgagaccagcctgggcaacatggtgaaatcctgtctctactaaaatacaaaaaattagccaggtgtggtgttgggcacctgtaatcccaggtactcaggaggctgaggcaggagaattgcttgaacccaggaggcagaggttgcagtgagccgagagcgcaccactccactccagcctggacaacagagcgagactccgtctcaacaaaaaaatgtttttaattagccagctgtgatgatgcatgcccatgtcccagctacttgggaggctgaagcaggaggattgcttgagcctgggaggtcaaggctgcagtgagctatgattgcgcccctgcactccagcctggacagcggagggagaccctgtctgaaaataaaaaaagaggtgggggcctatgaccccccctttaattttggcccaaccttagtaacaggatagtcattgagtagggcaaaagtgatgttatgatgtttttcagcctccaatttacagtctaaaacatgtcttgggtaaacacagcaagactccatctcaaaaaaaaaaaaagaaaaaaaatcagaagtgaacctgtagcctgtagtgtgttgccaaataaacttatttttagagatacttctttccattttctgtgaggtcatctgcagtttcacatggtagacagacttaggtgagattcttagcaacatagaatgaagagtaaagaggtttgtttatttcacaagggtttattgaaggcctacgatgtgttaaatgctgtaggaaatacccactgatttctcttttcatggaggtttcccgccttctcttaacgagtgatcaattaaactgtttactgggaacttgctaagttaatgaacacacgggatacattctttggatgagcagacattggttgggcagaggggcaagaggagagcagtttagacagagacctgcttatacactgtagtgtctaagagagcttgtgatgttcaggaaacagttgttcactgtgctgcaatataggggacggccagttgcggtggctcacacctgtaatcctagtgctttggaaggccaaggcgggcagatcacctgaggtcaggagttagaaaccagcctggccaacatggtgaaaccccatctctactaaaaacacaaaaattagctgagtgtaatggtggatgcctataatcccagcaacttgggaggctgagacaggagaatcacttgaacttgggaggtggaggttgcagtgagccgagatcatgccattgcactctagcccaggtgacagggtgagactctgtcaataataataataataataataataataataataatgtaggggacttgatgaagggaaaggatcagagagattctgaaaagaaggtagtttggggcccagtgatgactagattttaagtttcatatagtaggaagtggggcactagtaatttttcaagcagaaaaattatttgaccagattcgtgatttcaaaaatagctctggtgatagagtggaggatgggttggagcagggaataaggggaaatgaaaccgttataaaactcttaaagtgggctgggcatggtggctcacgcctgtaatcccagcactttgggaggctgaggcgggcggatcacgaagtcaggagatcgagaccatcctggctaaaacggtggaaccctgtctctactaaaaatacaaaaaattagctgggcatggtggtgggcgcctgtagtcccagccactcaggaggctgaggcaggagaatggtgtgaacccgggaggcagagcttgcagtgagctaagatcgtgccactgcactccagcctgggcgacagggcgacagagcaagaatccgtctcaaaaaaaaaaaaaaaaaaaaaaaaacctcttaaaacaagtacagcaagaactttgagggtctttgctaagacagcagctggcagcttcaatttggagtagggtatcaaaggcaactgtgtataaggaatagttatataactggtatccaatttctgagatgattttgacttaaacattgtgtatttcccagcatactgttggtttttctaattatgtgggaaattatgttgcttttacttttttttttgctcattgcccagcctagggtgcaatgctgcaatctcagctcactgcaacctccgcctcccaggtttaagtgattcttctgcctcagcctcccaagtagctgggattacaggcgcccaccaccatgcctggctaattttttgtatttttggtagagacagggtttcacgacgttggccaggctggtctcaaactcctgatctcaagtgatccacctgcctctgtgtcccaaattgctgggattacaggcatgagccaccgcaccggccatgctttcagttttcaagaaagaagacaccattattgccaaagattttggtaatttgagagatacaatgtatgttttctccatgtggatactagatagtaaggatgtgttgaatttgaagtgtctatccagaagtattttgggtacttgtttaaggattgtaaaacaatgtttccatttctggatataataaatgtatttgttaatataataaatgaatagattagacccataaactatttgcagtgttgagtcatttcccacagttaaaatcaggatgaaaatatatagctgaatacctgctttgtttcttgtaactgatttctttagtacagaacctgctaaggccatcaaacctattgatcggaagtcagtccatcagatttgctctgggccggtggtactgagtctaagcactgcggtgaagaagatagtaggaaacagtctggatgctggtgccactaatattggtaagtttgggagagttttaagccacaagaaatgatcagtgaatgttgttgtagtcaagaaacatttgttattgaaataagactatcaagtgttgatgtagtaataaactattatttttaagttaaagttagcacctattatgtgcctagtacttagctaggtagtaataataataacgacagcttttcttgtgttcttatggtgtgccaggcaggtgttatgctaagaattgcacagaaatatctcatttaatttgcagaatagctgggcgtggtgtctgacgcctgtaatcctagccctttgagaggctgaggtggggggattgcttgaagccaagagttcaagaccaacctggccaacatggggagacctcgtctctattaaaaaataaagcaggccgggtgtggtggctcacgcctgtaatcccagcactttgggaggccaaggcgggtggatacctgaggtcaggaattcgagaccagcctgtccaaaatggtgaaactctgtctctactaaaaatacaaaaattagccagacctggtggcagaagcctgtaatcccagctactggggaggctcaggaatgagaattgtttaaatttgggaggtggaggttgcagtgaaccgagattgtgccactgcacgccagcctggggacagagcaagactctgtctcaaaaaaataaaataaaataaaataaaataaatcctggagtagtggctcacatctgtaatcccagcactttgggaggctgaggggggctgatgctttgaggtcaggagttcaagaccagcctaaccaacgtggtaaaaccctgtctctactaaaaatacaaaaattagccagatgtgatggtgcatggctgtactctcagctcctcagaaggctgagggaggagaattgcttaaacctgggaggtggaggttgcagtgagccaagatcgattgtgccactgcattccagcctgggtgacaagagcaaaagtccatctcaaaaaattaaaaaaaaaaaaaaaaagggaagaaaaaaaagaaaatgacaaaattaaaaaaaaattattaatctgccaaataactttatgagatagaacttattacctccattttacagttgaggaaattaagggacagtaaatttcctttttttgagattataaagctaataaaatagaatctaggaagtctgattccagaaccagttctgtttttttttcttttttttttttttgagatagagttttgctcttgttgccgaggctgcggtgcaatggcacgatctcaactcactgcaacctccacctcccaggttcaagcgattctcctgcctcagcctcacaagtagctgggattacaggcatgcaccaccacgcctggctaattttgtatttttagtagagatagagtttctctacgttggtcaggctggtctcgaactactgacctcaggtgatccgctcgctttggtctcccaaagtgctgggattacaggcatgaaccactgcgcccggcccccgttctccttactgggtatgttaaaattatttctttcaaaggaaaaggctggtcaaagtgcaacggtctttacaactaattgatcacaaccagttacagatttttttgttccttctccactccaactgcttcacttgactagtgtaaggaaaaaaaaaagaggaaagaaagaaaatgctaaactatttaatctgggctagtaaatggccagaaagaactttataaaaatgaaatatacaaaatgacactagtatgtttaactaaaggtatagttacgacacttaaatttgcacgttataaataatatcaatataaaaactgatagcgtgggtccatttttaataaatatataaatattttaaactttctagatctaaagcttaaggactatggaatggatctcattgaagtttcaggcaatggatgtggggtagaagaagaaaacttcgaaggcttaagtaagttaactttctaatcctattacaaaataattgggccacatgtcttagaattttgagtaacactgtcttgggaaacacaaaaacagttttttaaagccagttactagatatcatgtatatttgttgttatagcacttgagatatcttagtccttactttacagtctctttcagctctgaaacatcacacatctaagattcgagagtttgccgacctaactcgggttgaaacttttggctttcaggggaaagctctgagctcactttgtgcactgaggtgagaaaatatttttatccattcacttgaccccttagaaaaacctctctgaaaattaattggaatcattattatttacaattttctatctcaatatctcagcttctagcttctgaattctgttttgtctcactgccaatctaagtcctagtacttctgaaatgtgagcaataaatgaatgaaatgaagcaaatagtattctttaaaaaattggttacccttattaaaacagtaacttctcaatttgaacataacatatagataataaatgatagttaccattggttttcattatcaatttttagggaaacatttcaccaaagcactatttaattacagcacagatactaaatttttataaataattacatgcacacacacatatatagacatatatatacatatatatacatatatatacatatatatatacatacatatacatatatacatatatatacatatatacatatatacatatatacatatatacatatatatatacatatatacatatatacatatatatacatatatacatatatatacatatatatatacatatatatatacatatatatgtatatatatatattttttttttttttagacagagtcgcactctgtcacccaggctggagtgcagtggcacagtctcagctcactgcagtctctgcctcccaggttcaagtgactttcgtgactcagcctcctgaagagctgggactatagcgtgcaccaccactcctggctaatttttgtatttttagtagagatggggttttgccatgttgcccaggctggtctggaactccaggcctcaagtgatctgccctccttggcctcccaaagtgctggaattacaggcacgagccaccgcaccctgccctacatatacattttaattataatatcttttggattctttaaaaaaaattttaaaaattttaaaaaattctttaaaaaaattcttttaaaaaattttgtttgaagagtaataacaaaacaaatctctatttgagaatcaataaatcttgagatcatttatggttttgcaattcaacctgaaaaatgaagtcaaagcttttatcaaaacaaagcatgtttagtgctctctgtctcactgtcttttagatgccagaccttagattttgtgatgactcctcaaccgtttagatctcggttatctcagagggatcatcagctttttaagaaaattttgagagaaaagcaagtgaagaaaagagtagtcagtgcccaacatcatggatctctcactgaacacaccatgcctggtattctctcacagtgatgtcaccatttctacctgccacgtatcggcgaaggttgggactcgactggtgtttgatcacgatgggaaaatcatccagaaaaccccctacccccaccccagagggaccacagtcagcgtgaagcagttattttctacgctacctgtgcgccataaggaatttcaaaggaatattaagaaggtacagtaaattaatcctggttttcaagagtattggttaatgcacatgagcaaaagatttactaaagatgtttattcttcagttgattctcttcccataatttattgagaaatgctttatttgcatttctcattaaagacttaacttcaggatgatttacttttttctttttatcacataatgtttattaggactgggaaacatagtgagactctgtctctatgaaaaattaaaaaaaaaattgactgggcatggtggcatgcacctgtagttccagctacttgggaggctgaagtgggaggatcacctgagcccaggaacttgagactgcagtgagctatgattgcgtcactacacttcagactgtgagacagagtaagaccctgtctggaaaaatatatatacatatatatacattttttttattttttatttttatctttttttgagatggagtctcactttggcgccctggctgcagtgcagtggcgcgatctcagttcactgcaacctccacctgccaagttcaagcgattctcctgcttcagccttctgagtagctaccattacaggcgcgcgccaccacgcccggctaatttttgtattttcagtggagacggggttccaccatgttgtccaggctggccaggctggtcttgaattcctgccctcaggtgatccgcccacctcggcctctcaaagtgctgggattacaggcgtgagccaccatgcctgaccttatgtacttatatttttatgagaatatttctcttggttttctgataaatgagttactggaacccttatgaatttgaatgcaaatgaaacagctaaatgttacataattgttgtgtttaaaaagcagattataaaactgtctgtattatatgattacagttttataaaaacaaaacaggcctaaatgtgtatagtataaagactgaagagtcagcacttccatgttctcagcggttatccttggatgtgagatctcatgcactttttgctctcttctttgtgcctttccattttgcatgcgtatttcttataatctaaaaagttacttaaacatatgcagctaaaaactttttttacttgtaaagcgtttggtgctaattttaacttttttttttagacggagtcttctcactctgtcgcccaggctggagtgcagtggtgtgatcttggctcactgcaacctccgcctcctgggttcaagtgattctcctacctcagcctcccaagtagctgggattataggtgtgtgtcaccacacccagctaatttttgtatttttagtagagatggggtttcaccatgttggccaggctggtcttgcacccctgacctcaagtgatctgcccacctcagcctcccaaagtgctgggattacaggcgtgagccaccacgcctggcttttttttttaaagcttttttgtaagtcagccagcaagaacacaggaggaagtactcaaatctcccttacacagctgggggctgtgtcaggttttataagcatagggtaatgaggtgtgatttgattggatcttgcaataaagtaatgctgggaggtgtgatctgactggatcctgccatggggtgacaccaaaactcaatctgattggatcctggctcctgcctgggggtgtctggttcttaaatcggtccgagctcttcaggctgagctcttaggttccactccacggtggcacgcgtggttaacctgggcatgcacagggtacatgaccttcaacctgcaggtcgatggcaattggaaaacaactgacaacttcattacataaaagttgaactgattcgggtgcggtgactcacgcctgtaatcccagcactttgggaggccaaggcaggtggatcacctgaggtcgaggagttcaagaccagcctggccaaaatggtgaaaccccgtctctactaaaaatataaatattagccaggcgtggtggcgcacccttgtaatcccagctaccccagaggctgaggcagcagaatgcttgaacctaggacgtggaggttgcagtgagctgagatcgtgccactgcactccagcctgggtgacaagagtgaaactccatcaaaaaaaaaaaaagttgaactagatttggtctgatgcagttacagatttacaaaccgcgtcccaccctcctgccaacaccttccactcctcattcttgagggattagggatggaggtcatgcttctgtatcgacttcatgctgaccaggggcacttagtcccctaaagtgagaggaatgaaactcttgggcttctgagttcagatgagttctggggtcacccggagtagcttgaaaggctggtattgttgtaatacaagctgaaggtggaagtgttggatcctggaggacaaacagctcaccatccatttaaataaataggaccaaaaagtaacagaacagtggccacgaggggccccaacagaggaagaaaccaggtgaggtgtggtatagtggactcgactgccttctaaatctcagtggttgtccgggtgcggtggctcacgcctgtaattccagcaaaagaagagccgaggcagggtgatcacgaggtcaggagttcaagaccagccgggcaaacatggtgaaaccccgtctctactgaaaatacaaaaattagccaggtgtggtggcgtgtgctgtagtcccagctactagggaggctgaggcaggagaattgcttgaacctgggaggcggaggttgcagtgagccgagattgtgccactgcactccagcctaggtaacagagcaggaccccatctcagtcaatcaatcaatctcagtggttgaactacccttgatatggttcagctctgtatccccaaccaaatctcatgtccaattgcaattcccagtgttgagggagggacctggtgggagatgattggctcatggcggctgacgtcccccttgctggtctcgtgatagtgagtgagcgctcatgggatctggttgtttagaagcatgcagcacctcctgcttcactctctctgtctctcctgctccaccatggccagaaacgtgcctgcttccccttcgccttctgccgtgattgtcagtttcttgagggctccccagccatgcttcctgtacagcctgcaaaactgtgagtcaattaaacctcttttcttcataaattccccagtttccagtagttctttatagcagtgtgaaaacagactaatggacccttctggttgaaggaatgtagccattctgcttgtttaagtatttcctttctattcatctctatttcccgggaggtgtttatccaagtgcaataggagatattggtgactgcagagtcccctcagtgttctgctagtaaatagttgaaggttgatcagtgatctccagcattttcagtctggcatggaaaagcccccatgtaactggtaaaggtatcagtaagcaccaggaggtatctaaatccaccaggagccataggcatcatgttgatgtccatttaccagtcttccctggcaagattctctgaattgtactgccttggccaaaagaggtatgggaggggctgggcacagtggctcacgcctgtaatcccagcattttgggagaccaattcgggtagatcattagaggtcaggggttcaagaccatcctggccaacatggtgacattccatctctactaaaaatacaaaaagtcagcggggtttggtgttgggtgcctgtaatcccagctactcgggaggctgaggcaggataatcacttgaacctgggaggaggaggaggtggcagtgagctgagatctcgccattgcactccagcctgggcaacaagagcgaaacttcatctc

SEQ ID NO: 1710 - DNA, 39110 bp, Homo sapiens
ggggcgcctgtgggagccgttgagggcactttcccagtccccgaggcggatccggtgttgcatccttggagagagctgagagctcgaggtgagctgggctcgcggtcgcccctctcgctcgccctctttgagaaccacggcttccgacctccctggaaatggggggaacatggccgaggcgcgtgggaggccgcctcgtggaggccccggagcggcatcctcagcgccccagcgatccggtgcccattaggtgcgccttgaagccgaggcaagctccttcggggtgctgggctgcgggcaaagaattcggccctgtgaagagttgggttcggcctgtctcaggccctgcccacatcccatcacagggccgtggacttgaagccggaacgtgaaatccccatagactgaatgcatttcctttctacctgttctctctccccttttatttttatttttatattattttatttttaatttttattttatttttttgtagagacggggatttcgctatgttgcccaagctggtctggaactccggagctcaagcagtccgcccgccttggccccccaaagctctggaattacaggcgtaatgcactgtgcctggccttttaaaaaaaaattgaggttattttggggacagtagagcgtccagacacatcctaatttgcgtagctgctcagttttaaaaaatgcaatgcatttttacctcttagggtatgtgatttctggctggtaagctacaccgaatcttggctagcacagttgaattccatgtcagatttgtaaacgcaaatttgctctctgcatttaaatatattagatatatttaggtaactacatttaaatgtattgagacatttaaatacacttgccgtctgtatctaaatatctgaagtggaccaggtgcggtggctcacacctataatcccatcactttgggaggccaaggcaagtggatcatgaggtcaggagttcacgaccagcctggccaacatggtgaaatcccatttctactaaaaatacaaaaattagctgggcgtggtggcaggcgcctgtaatcctagctacttgggaggctgaggcaggagaatcgctggaacccaggagacagaggttgcagtgagctgagattgcaccactgcagtctagcctgggtgacacagcaagactccatctcaaaaaaaaaaagaaaaaaaatcagaagtgaacctgtagcctgtagtgtgttgccaaataaacttatttttagagatacttctttccattttctgtgaggtcatctgcagtttcacatggtagacagacttaggtgagattcttagcaacatagaatgaacagtaaagaggtttgtttatttcacaagggtttattgaaggcctacgatgtgttaaatgctgtaggaaatacccactaatttctcttttcatgtaggtttcccgccttctcttaacgagtgatcaattaaactgtttactgggaacttgctaagttaatgaacacacgggatacattctttggatgagcagacattgggcagaggggcaagaggagagcagtttagacagagacctgcttatacactgtagtgtctaagagagcttgtgatgttcaggaaacagttgttcactgtgctgcaatataggggacggccagttgcggtggctcacacctgtaatcctagtgctttggaaggccaaggcgggcagatcacctgaggtcaggagttagaaaccagcctggccaacatggtgaaaccccatctctactaaaaacacaaaaattagctgagtgtaatggtggatgcctataatcccagcaacttgggaggctgagacaggagaatcacttgaacttgggaggtggaggttgcagtgagccgagatcatgccattgcactctagcccaggtgacagggtgagactctgtctcaaataataataataataataataataataataataataataataataatgtaggggacttgatgaagggaaaggatcagagagattctgaaaagaaggtagtttggggcccagtgatgactagattttaagtttcatatagtaggaagtggggcactagtaatttttcaagcagaaaaattatttgaccagattcgtgatttcaaaaatagctctggtgatagagtggaggatgggttggagcagggaataaggggaaatgaaactgttataaaactcttaaagtgggctgggcatggtggctcacgcctgtaatcccagcactttgggaggctgaggcgggcggatcacgaagtcaagagatcgagaccatcctggctaaaacggtggaaccctgtctctactaaaaatacaaaaaattagctgggcatggtggtgggcgcctgtagtcccagccactcaggaggctgaggcaggagaatggtgtgaacccgggaggcagagcttgcagtgagctaagatcgtgccactgcactccagcctgggcgacagggcgacagagcaagaatccgtctcaaaaaaaaaaaaaaaaaaaaaaaacctcttaaaacaagtacagcaagaactttgagggtctttgctaagacagcagctggcagcttcaatttggagtagggtatcaaaggcaactgtgtataaggaatagttatataactggtatccaatttctgagatgattttgacttaaacattgtgtatttcccagcatactgttggtttttctaattatgtgggaaattatgttgcttttacttttttttttgctcattgcccagcctagggtgcaatgctgcaatctcagctcactgcaacctccgcctcccaggtttaagtgattcttctgcctcagcctcccaagtagctgggattacaggcgcccaccaccatgcctggctaattttttgtatttttggtagagacagggtttcacgacgttggccaggctggtctcaaactcctgatctcaagtgatccacctgcctctgtgtcccaaattgctgggattacaggcatgagccaccgcaccggccatgctttcagttttcaagaaagaagacaccattattgccaaagattttggtaatttgagagatacaatgtatgttttctccatgtggatactagatagtaaggatgtgttgaatttgaagtgtctatccagaagtattttgggtacttgtttaaggattgtaaaacaatgtttccatttctggatataataaatgtatttgttaatataataaatgaatagattagacccataaactatttgcagtgttgagtcatttcccacagttaaaatcaggatgaaaatatatagctgaatacttgctttgtttcttgtaactgatttctttagtacagaacctgctaaggccatcaaacctattgatcggaagtcagtccatcagatttgctctgggccggtggtactgagtctaagcactgcggtgaagaagatagtaggaaacagtctggatgctggtgccactaatattggtaagtttgggagagttttaagccacaagaaatgatcagtgaatgttgttgtagtcaagaaacatttgttattgaaataagactatcaagtgttgatgtagtaataaactattatttttaagttaaagttagcacctattatgtgcctagtacttagctaggtagtaataataataacgacagcttttcttgtgttcttatggtgtgccaggcaggtgttatgctaagaattgcacagaaatatctcatttaatttgcagaatagctgggcgtggtgtctgacgcctgtaatcctagccctttgagaggctgaggtggggggattgcttgaagccaagagttcaagaccaacctggccaacatggggagacctcgtctctattaaaaaataaagcaggccgggtgtggtggctcacgcctgtaatcccagcactttgggaggccaaggcgggtggatacctgaggtcaggaattcgagaccagcctgtccaaaatggtgaaactctgtctctactaaaaatacaaaaattagccagacctggtggcagaagcctgtaatcccagctactggggaggctcaggaatgagaattgtttaaatttgggaggtggaggttgcagtgaaccgagatggtgccactgcacgccagcctggggacagagcaagactctgtctcaaaaaaataaaataaaataaaataaaataaatcctggagtagtggctcacatctgtaatcccagcactttgggaggctgaggggggctgatgctttgaggtcaggagttcaagaccagcctaaccaacgtggtaaaaccctgtctctactaaaaatacaaaaattagccagatgtgatggtgcatggctgtaatctcagctcctcagaaggctgagggaggagaattgcttaaacctgggaggtggaggttgcagtgagccaagatcgattgtgccactgcattccagcctgggtgacaagagcaaaagtccatctcaaaaaattaaaaaaaaaaaaaaaaaaaggaaagaaaaaaaagaaaatgacaaaattaaaaaaaaattattaatctgccaaataactttatgagatagaacttattacctccattttacagttgaggaaattaagggacagtaaatttcctttttttgagattataaagctaataaaatagaatctaggaagtctgattccagaaccagttctgtttttttttcttttttttttttttgagatagagttttgctcttgttgccgaggctgcggtgcaatggcacgatctcaactcactgcaacctccacctcccaggttcaagcgattctcctgcctcagcctcacaagtagctgggattacaggcatgcaccaccacgcctggctaattttgtatttttagtagagatagagtttctctacgttggtcaggctggtctcgaactactgacctcaggtgatccgctcgctttggtctcccaaagtgctgggattacaggcatgaaccactgcgcccggcccccgttctccttactgggtatgttaaaattatttctttcaaaggaaaaggctggtcaaagtgcaacggtctttacaactaattgatcacaaccagttacagatttttttgttccttctccactccaactgcttcacttgactagtgtaaggaaaaaaaaaagaggaaagaaagaaaatgctaaactatttaatctgggctagtaaatggccagaaagaactttataaaaatgaaatatacaaaatgacactagtatgtttaactaaaggtatagttacgacacttaaatttgcacgttataaataatatcaatataaaagctgatagcgtgggtccatttttaataaatatataaatattttaaactttctagatctaaagcttaaggactatggaatggatctcattgaagtttcaggcaatggatgtggggtagaagaagaaaacttcgaaggcttaagtaagttaactttctaatcctattacaaaataattgggccacatgtcttagaattttgagtaacactgtcttgggaaacacaaaaacagttttttaaagccagttactagatatcatgtatatttgttgttatagcacttgagatatcttagtccttactttacagtctctttcagctctgaaacatcacacatctaagattcaagagtttgccgacctaactcgggttgaaacttttggctttcgggggaaagctctgagctcactttgtgcactgaggtgagaaaatatttttatccattcacttgaccccttagaaaaacctctctgaaaattaattggaatcattattatttacaattttctatctcaatatctcagcttctagcttctgaattctgttttgtctcactgccaatctaagtcctagtacttctgaaatgtgagcaataaatgaatgaaatgaagcaaatagtattgtttaaaaaattggttacccttattaaaacagtaacttctcaatttgaacataacatatagataataaatgatagttaccattggttttcattatcaatttttagggaaacatttcaccaaagcactatttaattacagcacagatactaaatttttataaataattacatgcacacacacatatatatacatatatatacatatatatacatatatacatatatatatacatatatatacatatatacataaatatatacatatatatacatatatacatatatacatatatacatatatatacatatatatatacatatatatacatatatatatatatatattttttttttttttttttttagacagagtcgcactctgtcacccaggctggagtgcagtggcacagtctcagctcactgcagtctctgcctcccaggttcaagtgactttcgtgactcagcctcctgaagagctgggactatagcgtgcaccaccactcctggctaatttttatatttttagtagagatggggttttgccatgttgcccaggctggtctggaactccaggcctcaagtgatctgccctccttggcctcccaaagtgctggaattacaggcacgagccaccgtaccctgccctacatatacattttaattataatatcttttggattctttaaaaaaaattttaaaaattttaaaaaattctttaaaaaaattcttttaaaaaattttgtttgaagagtaataacaaaacaaatctctatttgagaatcaataaatcttgagatcatttatggttttgcaattcaacctgaaaaatgaagtcaaagcttttatcaaaacaaagcatgtttagtgctctctgtctcactgtcttttagatgccagaccttagattttgtgatgactcctcaaccgtttagatctcggttatctcagagggatcatcagctttttaagaaaattttgagagaaaagcaagtgaagaaaagagtagtcagtgcccaacatcatggatctctcactgaacacaccatgcctggtattctctcacagtgatgtcaccatttctacctgccacgtatcggcgaaggttgggactcaactggtgtttttgatcacgatgggaaaatcatccagaaaaccccctacccccaccccagagggaccacagtcagcgtgaagcagttattttctacgctacctgtgcgccataaggaatttcaaaggaatattaagaaggtacagtaaattaatcctggttttcaagagtattggttaatgcacatgagcaaaagatttactaaagatgtttattcttcagttgattctcttcccataatttattgagaaatgctttatttgcatttctcattaaagacttaacttcaggatgatttacttttttctttttatcacataatgtttattaggactgggaaacatagtgagactctgtctctatgaaaaattaaaaaaaaaattgactgggcatggtggcatgcacctgtagttccagctacttgggaggctgaagtgggaggatcacctgagcccaggaacttgagactgcagtgagctatgattgcgtcactacacttcagactgtgagacagagtaagaccctgtctggaaaaatatatatacatatatatacattttttttattttttatttttatctttttttgagatggagtctcactttggcaccctggctgcagtgcagtggcgcgatctcagttcactgcaacctccacctgccaagttcaagcgattctcctgcttcagccttctgagtagctaccattacaggcgcgcgccaccacgcccggctaatttttgtattttcagtggagacggggttccaccatgttgtccaggctggccaggctggtcttgaattcctgccctcaggtgatccgcccacctcggcctctcaaagtgctgggattacaggcgtgagccaccatgcctgaccttatgtacttatatttttatgagaatatttctcttggttttctgataaatgagttactggaacccttatgaatttgaatgcaaatgaaacagctaaatgttatataattgttgtgtttaaaaagcagattataaaactgtctgtattatatgattacagttttataaaaacaaaacaggcctaaatgtgtatagtataaagactgaagagtcagcacttccatgttctcagcggttatccttggatgtgagatctcatgcactttttgctctcttctttgtgcctttccattttgcatgcgtatttcttataatctaaaaagttacttaaacatatgcagctaaaaactttttttacttgtaaagcgtttggtgctaattttaacttttttttttagacggagtcttctcactctgtcgcccaggctggagtgcagtggtgtgatcttggctcactgcaacctccgcctcctgggttcaagtgattctcctacctcagcctcccaagtagctgggattataggtgtgtgtcaccacacccagctaatttttgtatttttagtagagatggggtttcaccatgttggccaggctggtcttgcacccctgacctcaagtgatctgcccacctcagcctcccaaagtgctgggattacaggcgtgagccaccacgcctggctttttttttttaaagcttttttgtaagtcagccagcaagaacacaggaggaagtactcaaatctcccttacacagctgggggctgtgtcaggttttataagcatagggtaatgaggtgtgatttgattggatcttgcaataaagtaatgctgggaggtgtgatctgactggatcctgccatggggtgacaccaaaactcaatctgattggatcctggctcctgcctgggggtgtctggttcttaaatcggtccgggctcttcaggctgagctcttaggttccactccacggtggcacgcgtggttaacctgggcatgcacagggtacatgaccttcaacctgcaggtcgatggcaattggaaaacaactgacaacttcattacataaaagttgaactgattcgggtgcggtgactcacgcctgtaatcccagcactttgggaggccaaggcaggtggatcacctgaggtcgaggagttcaagaccagcctggccaaaatggtgaaaccccgtctctactaaaaatataaatattagccaggcgtggtggcgcacccttgtaatcccagctaccccagaggctgaggcagcagaatgcttgaacctaggacgtggaggttgcagtgagctgagatcgtgccattgcactccagcctgggtgacaagagtgaaactccatcaaaaaaaaaaaaagttgaactagatttggtctgatgcagttacagatttacaaaccgcgtcccaccctcctgccaacaccttccactcctcattcttgagggattagggatggaggtcatgcttctgtatcgacttcatgctgaccaggggcacttagtcccctaaagtgagaggaatgaaactcttgggcttctgagttcagatgagttctggggtcacccggagtagcttgaaaggctggtattgttgtaatacaagctgaaggtggaagtgttggatcctggaggacaaacagctcaccatccatttaaataaataggaccaaaaagtaacagaacagtggccacgaggggccccaacagaggaagaaaccaggtgaggtgtggtatagtggactcgactgccttctaaatctcagtggttgtccgggtgcggtggctcacgcctgtaattccagcaaaagaagagccgaggcagggtgatcacgaggtcaggagttcaagaccagccgggcaaacatggtgaaaccccgtctctactgaaaatacaaaaattagccaggtgtggtggcgtgtgctgtagtcccagctactagggaggctgaggcaggagaattgcttgaacctgggaggcggaggttgcagtgagccgagattgtgccactgcactccagcctaggtaacagagcaggaccccatctcagtcaatcaatcaatctcagtggttgaactacccttgatatggttcagctctgtatccccaaccaaatctcatgtccaattgcaattcccagtgttgagggagggacctggtgggagatgattggctcatggcggctgacgtcccccttgctggtctcgtgatagtgagtgagcgctcatgggatctggttgtttagaagcatgcagcacctcctgcttcactctctctgtctctcctgctccaccatggccagaaacgtgcctgcttccccttcgccttctgccgtgattgtcagtttcttgagggctccccagccatgcttcctgtacagcctgcaaaactgtgagtcaattaaacctcttttcttcataaattccccagtttccagtagttctttatagcagtgtgaaaacagactaatggacccttctggttgaaggaatgtagccattctgcttgtttaagtatttcctttctattcatctctatttcccgggaggtgtttatccaagtgcaataggagatattggtgactgcagagtcccctcagtgttctgctagtaaatagttgaaggttgatcagtgatctccagcattttcagtctggcatggaaaagcccccatgtaactggtaaaggtatcagtaagcaccaggaggtatctaaatccaccaggagccataggcatcatgttgatgtccatttaccagtcttccctggcaagattctctgaattgtactgccttggccaaaagaggtatgggaggggctgggcacagtggctcacgcctgtaatcccagcattttgggagaccaattcgggtagatcattagaggtcaggggttcaagaccatcctggccaacatggtgacattccatctctactaaaaatacaaaaagtcagcggggtttggtgttgggtgcctgtaatcccagctactcgggaggctgaggcaggataatcacttgaacctgggaggaggaggaggtggcagtgagctgagatctcgccattgcactccagcctgggcaacaagagcgaaacttcatctcaaaaaataaaaaaagaagtctgggtgtggtggctcgtgcctgtaatcccaggactttgggaggccaagatgggtggatcatgaggtcaggagttcaagaccagcctggcctagatggtgaaaccctgtctcgagtgaaaatacaaatattagctgggcatggtggcacacacctgtaatctcagctactcagaagtctgagacagaagaattgccaaaacccgggagggagaggttgcagtgagccgagatcgcgccactgcactctagcctgggcgacagagcaagactccgtctcgaaagaaagaaagagaaaggaaattccccagggaagtacctcggcttatttcatgaagaggtactgaaggaagcagaggcatgtggaggacttccccacctcgtgcagctatttgggccgtggcgtctgaaatttcttatttcagagtcacccctttgatgaccttggcagtggactgcagtcatctgtttaggcctctccatggcccgtgtcaatgccgatatttctgtctgttgcacatttgatttccttgttgttggcatttagaaggccccctgtttcccagatcacaccacgggcatggaccgcagagattgcatcttgtgagtctgtagaaacagtcaaggccttgtcctctcttaggtccagagctcaggtgaatgcagattttcccggccatctgtgctgaagtccctgtggggaggctcctggctggtttcctgtaggtagacagctacacatcctgcccttcattggcttcttttcatgaagctcctgctgtctacaaaacatgtctcccttttcttcttgaaccacatctctgttattgaaactctagaagtcagccaggcacagtggctatgcctgtaatcccagcactttgggaggccaaggtgggtggatcacctgaggtcaggagttcaagaccagcctggccaacatggcgaaaccctgtctctaatacaaatactaaaattagccaagcatggtggccactgcactccagcctgggtgacagagcaagactctgtctcaaataaagaaagagaaagtatcatgcttttcagagttctgtgggttgttatggtgaattatcaaacctgaggacgtggtgggaacctccaaatttgcagccagttggtgagaagtacatgcggtctgtggacacccaagcttgcagctgcatctgaagcgagggcagcctagcgggggctggtggccttaacctgtggcatttgatgtaacatcagggagttgacatcagaattacgtcacacaggccaggtgcagtggctcatgcttataatcccagcaattagaaaggcaagataagaagattgcttgagcttgagtctgagcccacagtgagctatgaccgcaccactgcaccccagtctgggtgacagcacaagaccccgactccaaaaataaaaaagaaaaatcacaaagaattgcatggcagagtgcctgtctttcacagcttgaactgttgcaggaactttctttttttttttttcttttgtgatggagtctcgcgctttcacccaggctggagtgcagtggcgcgatctctgctcactgcaggctccgcctcctgggttcacaccattctcctgcctcagcctccggagtagctgggactacaggcgcctgccaccgcgcccagctaattttttgtatttttagcagagatggggtttcaccgtattagccaggatggtcttgatctcctgacctcatgatccacccacctcagcctcccaaagtgctgggattacagtcctgagccaccgcgcctggacttttttttttttttttgagaggggttggggagacatattctctgctagtgattctcctgcctggtctcgaactcctgctgggatcacaggcgtgagccaccacgcccagccacctttagagttttcttaccacctggttttcctctctcaatatctttctctcatttcctgctttaaaactctagcttggggtctgggcacagtagctcatgcctataatcccagcactttgggagactgaggcgggtggatcacttgaggtcaggagtttgagaccagcctggccaacatggtgaaaccttgtctctactatttttacaaaagttagtcagacgtacaggcggatgcctgtagtcccagctacttgggaggctgaggcaggagaatttgcttgaacgcggaggtgaaagttgcagggagccgaggttgtgccactgcactccagcctgggagacagagcgagactgtctccaaaacaaacaaacaaacaaacaaacaaaaaaaccctgtagcttgggatcagccttctcttctgttgtttttctttaaaaaataaaaattaaaaataggcttcaagtgatcctcccgccatgacctccaaaactgctgggattgtaggtgtgagcactgcacccagccgtatgtttttttctacataaaaaacagcacaggattatcttccaaagctaacaaatatgttcaaataaccacaaccccattaaggaaaaatgtcacttgacagcaaataatcaatccagaccacaatatgatcacactcactgtgaaggtgagaaaagttcatctttattatgtttccccaagagatgcactgcactgttctcttgaaaacacacagctcatgtcctcctttagaacacacatcctctttaaagtaacatacaaacatgccaaaacaagataaaaaattccatctgaattctcacatttcaaacatacactaaatatcaaataaaaatttatttttacaagaatttaggggaactaccacatagctataaatgtaatatatatgttaactaagtatcatagataaaaaccatgctcccttcagcagcacgtgtaataatagatacaaagattgaaaggtaaaagatttaggatgaaaagaatcctctcttaaaaaggaaaacaaaattatatgtatgtgtatacaacagttataatacccatcacacagctttatagaaacagcatctattcaaaaataccagtatttccaaaatatttaaaataatatttaaagtaataataatatttaaataaataaatatatttaataaatatttcagtaaataaaataatatttaaataattctatacccatgtttttcaaaataaaccaataaaatagatagtatatattagacgtgttagtatatatatctgagacatgttaaaaatcacaactgaattctcacaagtcagtcacaaacctaaacagcaaataaaaatttctatcaccagaattatgtttttttctggtggggaactaccaatagctataaatagaagagattattatggaagtatcatagataaaaagagtgctcgcttcaggagcacatataataatacagaaaaaaaattaaagataataaaagatttaggataaaaagaattctcacttaaaaatgaaaagaaaattatctttaggtatatataacaactataactctcatcaaaaaactctacaggaacagcatgttttcaaaagtacaacaatttccaaactatttgaaataaacctattaataattcaatggccaacattttccaaacaaaccaataaaatgcatagtgtgcatgaagctatctgttacagtctgtggcactcatatttcacaaagaattctgtgccaatctgagcccctgcactgtgccttcaaatgctcctggactgtgacaaccaagtccataagaaacaggacctccaggttccgccccagggaggttggcattcagcaatataaaaagggaggtggtgccgcaggaaagggtggaactggaaacactcctggtttcttacttttctccaaggactcctagaagtaccccaccccacccctgctccttggaggacaacgtgatcactgtattcagctctgtcaagaatggtccaggttcttctagatgatctgcacaaatggttcctctcctccttcctgatgtctgccattagcattggaataaagttcctgctgaaaatccacatctcccctgggtccggtgttctggaagtgagagagacaatgtcacacttcaaggaggcagctctctagacaggaaggttattcacgtcccatgtcaagtctagctagagttcagagcaattgagaagtgcaattttatctcctgcctttcattctataccctgcttctgaaccatcgtgttcaactgtgaaactcacactttggtgaccctgactccaaaacttaatacacccaaggtcagccccagtgatctgcttcatagccaggactttgggtgggtcttcccagggagtagggcaccctcagagaatgtggctttggacttcatcacagctggggccttttgtgtcacttcagatctaaacttgtaaccgtgctagatctgtttctaacgtgacaacatcacgaaccacgagtccagaagcctaatccataatcctccctcctcatgacgaagtctcatgctctgtgctcaacatggttagctgcacaagatgtaaaccaaagcttcactgaaccctcgacccaaatcggtaactcaagtgcatcaatcataatgaacctccccgaactcagtatttatgattatttttgaggcagggtctcactctgtcgcccgggctggagtgcagtggcaggatcagggctccctgcagccccgacctcccaggctccagcgatcctcccgcctcagcctcctgagtagttgggagtagagatgcctcccacatcgcctggctaatttttgtatttttgtggagaggggatctcgccacgttgcccaggcttgaagccagatcaagcaattgggttccttggatttccgaaatagaccccaatattctgcctttaccccggaggatgcagatgtaccttctctcaggccgatgacctcaggcctccacggtccctggagctctaggaaaggtgggcgcgatctcgcgcccacacccagtgctctgggtcataagcctggatctggaaaaacaaacgcgctttgagaagacggggactccccaggatacccctctctcccctcgtccagcctccagcccacccgattcctccccacatcctccacgtccccaggccccacccacctcttccaactcctccagggaaacccaagccctgcagcgcatggaacaaaagaagtggaaccgatacttccggaacaaggctatctgagagcagttcttcctggccctcgggttcatgtaacggcataactggaaccaaagctcactgagcaagggtatatgagagcgggtctcctcgtacaggaagtagaagatgttttgtttgggggcctcgtcgtcctcctccatgtcattggccagatagctgaggacagaaatcaggttgctgctcaggggcaccaccaggagagacctccggctgaggtcagcttctcagagaggaaggtaagggaccgtccctagctcaggactggcacccaccctgcagagagccacgccttcctcaggagggctctgctggacagagacctgatcaagggcgtctcccactccttcaggatggagacaaaaacccaactggtgaccaagagtggtggcttatgcctggaatcccagcacactgggaggccgaagcaggaggatcacttgaggccaggagtttgagacaggcctgggcaacatagcaagaccctcgtctctattaaaaatataaaaaatacgccagacgtggtggctcatgcctgtaatcccagcgctttggaaggctgaagcaggtggattgcttgagaccaggagtttgagaccagcctggtcaacacagagaaaccccatctatactaaaaatacaaaaatcagcctggtgcggtggcacacccattagtcctagctactcaggaggctgaagcataagaattgtgtgaacccaggaggcggaggttgcagtgagccaagattgggcccctccattccagcctgagagacacagcaacactcttgtcttgataaataaataaataaataaataactgtccaggtgtggtggtacagccctgtagtcggagctaatcaagaggctgaggtgggaggatcgcttgagcccaggatatggaggctgcggtgagctatgatctcaccactgcactccagcttaggggacagggcaagtctgtctcaaaaaaaaaaaaaaagcaattgaatacactgatattttgccaggaccctgccttctacaggcatctagtctaatgggactgggagtaatcaggggagatgacctaatcccaatgtcacattataataggatgtaactggagagctacgggcatgcagaagttggaagacgagggaaggcatcacagaggctgtggggtgaaccgacttcaaggaatgggtccttcccttcagaaccacatgtgtgcgggacacccagacagaaaacacaaatgcaaagtcaagtggagggcatttggaaggagcagtgaagccaagccaggaaacaccaagatggcgagccagtgtggttgtagagattgtagagagggtggaattggcactgtggaccctggcctcgatagagaaagacatcagctaaggaagttgttcaggtgggcagtgaggttgtcgtgctttggaaagatgttcaggctgcactaggaagccccctggcttggggagagactccaggaaaccccagcagggagcatttgacagtggattcgagtgatgcaagggggacctggactgtgacctctgtcacgggaacccggaggaggctgatggcttttgcggttgatgtgggaaggagagagaacaaccggaaacgtctgcttgctgggggaagtgtcatgtccgctcctccgctccttttcttctccccttaggagcggttcatggttccttttgttttttgttctttttttttttttttttttgagactataatcctgtcttttttgtacacagagtaaagaggacaaataggtgaaagaataaatgaaaggctggaatcccacttcccccgctgtcccagggcattggatattgacggataggaggcagcaaaccactcacagagccaggaagaaatgaatgcgttggtattgccaggaggggaggccggcccggctgaaatacgctatgaccatagccaggagatactgatggagagaaaggaacacagagagggagaggtcacatcttgggagaggaagattgtggatatagtggaatgggggtctggggaggggttgcccatcagagaagggacctcagtgttggggtgactgtgctcatgtggaaattgcggggtggaggggtattcgaaggtcggatgcaaatccgagaagccggaggaagggtttttggtgatgctcccaggatggtgggctccgatgggatctttggagggggtgtgtctaggtcggctggtgtcaggagggtcttttgtgtgccaggcagagaactgtcccaaggagctgagagtagagggcccaggagcttcagggctgcagccagactgtggcccagggctcagatcccaaaggacccataggagaggcaggggccactcattcactctgcaagagaccagcagaatcctgacggagatgctgacaaatcataaaaagacaaagaatagccgggagtggcagctcaagcctgtgatcccagtactttttgagaggtggagacaggaggatcatgtgagcccaacagttggagaacaacctgggcaacacagcgagaccctgtttctaagaagatttcaaaaattagttgagcatggtagcatgtgcctagtcccagctcctcaggaggctaaggaaagaggattgcttgagcccaggaattagagtgagctatgatcatgccactgtactccatcctggggagcagagctggactctgtctcagaaaaaaaaatgtgtgggtgccaagactcaagaccatgggagctggtcagacacagtgctgacgtctgtaatctcagcactttgggaggccaaggcgggtggatcacctgaggtcaggtgttcgggaccaatctggccaacatggcaaaaccccgtctctactaaaaacacaaaaattagccaggcgtggtggttcatgtttgtaatcccagctgcttggaggctgaggtgggagaatcgcttgaacccaggaggcatcagctgcagtgagtcaagatcgagacactgccctccagcctgggcagcagagcaagactgtgtctcacaaaaaaaaacaaaaacaaaaacaaaaaaaaactgtaggagcatctggtgggaggtggtggacggagaactgtgggtttggaagctgcgccctccccctggccgtgcgttagaacaggaacacagttacatagagaacaaccttaccttgtccgacaccctcagatctttgtcccaggccaggagtcttttaatgacaggatcctctgtgattagagagcagatgtcagtgtgagaagcaggacagggtttccgtgagagcagcagggcagcgaggagaagtgtgcctcccgggggaaagtctcaggattgtggccgcgggtgaggtggatgagagaggggagaatgactttcactgggcaagggagagaggctcctgctctgagactcccctgagaagaggccgaaggaggccctgggtgtgagaatctacaggatgtagagctgggaatcagccaggaccccctccagcagacacggagggaccactgcagagtcataaaggaattcccatcatttcctcatgagacagtcacacatcagggtgtgaccatggccttgggatcccccactatggatggagacacttaggtttagcaaagtcagtaagaaacattaagtttcagagggcacagctgaaaccacttttttgatttttgattttgtttttctttatttgatttttatttttatttatttattaatttattttgagacagagtcttgctctgtgggccaggctggaatgcattggcctgatcttggctcactgcaacctctgcctcctgggtttaagcagttctcctgtctcagcctcccgagtagctggaactacagggatgagctactgtgcccagccttggtttttcttttgacgcagagttttgctctgtcacccaggctggagtgcagtggtgcagtcatagctcactgcagcctcaaagtcctgagttcaagcaatcctcttgcctcagcctcccaacgtgctgggatctcaggcgggagccacagcgcctggcccaaaaccaagctttcttatcccaagcaccgacctttatcaagtctacctaatcctctgttgtctccttaagtgtccctcatgagtgatcacttcagagtcctcccgcatggagagctcacccactggggcatatttttcccattggaaaagtgtggttattggaagtttcctctttagaaagaacaggattggaggtgctctctggggtgtcctcctaccaagcagcctgttgaaggcctcgtagtactcagggagcacgagcgacactcgccgtcgcttcgccttcatcttgaggccacacagcgtctccgccacccaggtctcctcaggctcaggggcgagctccttctctggctcatcatcagattcatccaaacattccctcttccttttccagccaagggacctacgtggggggctgggatctaccccaggggctgagtaaagaaaccaggccaccgtgtaatgcttctgcaactgatcacgttagaccccgaccccaaaccccaaaccactctccatcctccccagcctcgcagactgctggcttctccaagccacctttctgactttctcctctgctcaaccccatgtgccactccttcccctccccattcttccctctctctgtcctcagaacactgcctcatatccttccctggtccctggctctctgagtccctctttttttttttttttttttgtttcgagacagaatcttgctttgtcacccaggctggagtgtagtggtgcaatctcagctcactgcaacatgcatctcccggattccagttattctcctgcctcagcctctcaggtagctgggattacaggtgcctgccataatgcccagctccattttgtacttttaatagagacagggtttcaccatgttggccaggctggtctcaaactcctggcctcaagtgatccgcctgccttggcttcccaaagtgctgggattacaagtgtgagccactgcacccagcctgaatttctccattcttcccacacaccctccccaggttctccttcctgacctctgacccttcttttttttcttcttttttttttttttttttttttttttttttttttgagatagcatctcactctgtcacccagactggagtgcagtagcacgatctcggctcactgcaacctcttcctcccaggctcaagtgattctcctgtcttagcctcccaagtagctgggattataggcacacaccactaccgcctggctaatttttgtacttttagtagagatggggtttcaccatgttggccaggctggtcttgaactcctgacctcaggtgatctgcccgcctcagcctcccaaagtgttggggttacaggggtgagccaccacgcctggcccccttccttcatcttagtcaatcctatgccacctcttcttcctccagtcccctcacctgatggtcccgacacttcatcatccaccacctcctggagggggtaccctgaggtgctccgctgggggctccgctcttcctggggctgcggttgatggctcatcatgatctttcccaaaatctgtcccatctcaccaaacctagtctctgttctgtccttggtcttcttctggacactgctgggatccagaagagtgtgttatcaattctcgaggctgggagaagtcaggagtggagaacagctctgagaagttactgttgtccaactgaactcccaggtgccgacagagtccggtccctccaatcaggaaggtcggaatctctgatgtcatcgctcatgccaacctggcaaccagtttgaaaaaaaacacatgtaactgccaggctgatctcttgtcctggagatcctgggtgaatggtatctcctgccactgtcccaacctcagaccactgtccaaaagcatcttcagggtctccgcatccctctgttccctgtcccagcagaggctgtgtcctctccactcaaagcttgaagcgtgttggggtctcctcttctctgtacatgcccgtttcagagtccagtctggtgggagagggatcaggatgggaaagaaaagtagggtaagcagaaacgatgaaaccttacaagagtgagattatcatgtacaagagatcccaggaacattgacttgatgaaaaagtcacatcagagcactcaatttggcagaggttttctgccgagtgtctactgacattcactgtccgagattctgtactgggggtacacgcgtcctctgccctaaggcatctttgagtccaagagatattttgaggactggaaatcataggaaactgcccatgagttcacacatatttccaatggtgtccccaatttcagggagtccacggatcacctaaagccagcccctccagtttggctaagaaactctatatatcaagttttgtatcatatgtattgctcttaactcagaaaattccaccatttatagcagtggtttatttatttataccattgaaggaaatggtttatttatgaatctatattatggatattctataagatactgggtgtacaaaaagactaagtcgaaaaatctcagctgtgcacagtggctcatgcttgtaatcccatctctttgggtggccaagggaggaagactgcctgaggccagcagttcaagaccagtataggcaacatagcaagagcccatctctaaaacaaaacaaaacaaaacaaaacaaaattagccaggtgtcgtggctggcacctgtgttccaacaacttgagagactgaggtggcaggaggattgcttgagcctaggagttaggggctgcagtgagctgtgatcgtgacaccgcactccagtctgggcaacacagcaagaccttgtgtcaaaaaaatttttttaattaaatataaaagagtttcatgacattcagagaccatccaaagaacctgtgggttccggccaggcacagtggctcacgcctgtaatcccagcgctttgggaggccatagcaggtggatcgcttgaggtcaggagtttaagagcagcctggccaacatggtgaaaccccatctcttctaaaaatacaaaaaattagtcaggcatggtggtgggtgcctgtaatcccagccactcaggaggcggggacagcagaatggcttaaacttgggaggcggaggttgcagtgagccaaggtcacaccattgcactccagcctgggcaacaagagcaaaactacatctcaaaaaaaaaaaaaaaacaaaaaaaacaaaaagaacctgtggatgagttcccacatggcttcctaacgggctgcggctctcctaggagtctctcgctcatgggaaaggcacaaactgaatgcggaaggaaatcccattgctgtggaagtcccattgttaggaagctctgcttttctggagttcaaatttgcattcatgacgctttaaaccgtcagagctgggtgtgtcctcctacaacaaatcactttactctctctcctggttaacaggctttcaaatattagaacatccatgttctgacctcattaaaattgctcttttgtggaatgaaaagctctgatttaacccgtctttaagcctggtatgcatattcctctctgttccggccaccttgtctagacacactacactgaggcagtgcccatcttagatgatgttgatacattgtcaaaaaatgggcaaaccaggtgcggcggctcacacttgtaatcccagcacttttggaagctgatgccgacagataaccagaggtgaggaggttgagatcagcctggccaacatggtgaaacctgtctgtttttctgtaaaaatacagaaacaatgagctgggcgtgggagtgcacttctgtaatcccagctacttgtggggctgaggcaggagaatcacttgaaccgggaaggtggaggttccagtgagccgagatcacgacactacactccagcctgggcgacagagtgagactccgactcaaaaaaaaaaaaaaaaaaagtgccagacagcccaggtttggtctgatatgttcagaaaaaagcaaaacagtcacctctcaccttttcttttcctgcaatgatgccgtttaatacaacaatggctgtaggtctgcggcagaaatatcattcaagtgaaacagaagggctttcctggctggacacagtggtcactcctgcaatcccaacactttggttggctaaggtgggaggatttcttgcggccaggagttcgaggctgcagtgagctgtgatccaccactgcattccaggctgggcatcagagtgaggcctgtctctaaaaaaacccttcactccccaaaaaaagggattttcaaataccagcctttcagcatgaggatcacatggaggaacattaagacacagatgctgggacccagccctattgattgtaattaaaaaactgaggtgaggcctgatttagctccatcattggaatccattcagatttgaaattctctgagttggacagtgcaagagagatcctaaagaaagcaaagtcactgtggactgaaatgagctggcaaggttttctgagcgtggtgaaatatgatctgggcctcgcttgggagggctgtggccaggccttgagtccgtggctcagtgggaccttctgaaacagcctccaatccgtgcccccacttcatttgctagtggatgaccccctccagcggctttggtgctgatgggaataagtcaacctgcagcggaagttcagcccaagtttcagcccagcagcttctacacacctgtccgtggtctggtcatgctgccatctctgcggttctctgcggttctctgcggagtcgtggtttctgtaccttgaagagaacttcccctctgggacccagaaacccagtgaatcctcaggaaaaaagggaatgaaattactgaagacaactctgtggcggggagatggaaaagaggctctctctctttttttttcctaatattttgagacagagtttcgctcttgtcacccaggctgcagtgcagtggctccatctcggctcactgcaacctctgcctcccaggttcaagcgattctcctgcctcagcctcccgagtagctgagattacaggcacccaccaccactcccggctaatttttgtattttagggtttcgtcatgtttgccaggctggtcttgaacacctgacttcaaatgatccacccgcctctgcctctcaaagtgctgggaatacaggcataagacactgcacccggcctgtttttgttttttagagacaaggtctctgttgccttggctggggtgcagtggtacaatcagctctctgttgcctcggctggggtgcagtggtacaatcagctctctgttgcctcctgggctcaagcaatcctcttctctcagcctcccaagtagctgagactacaggtgcatgcctgtagtagatatagcatcttgctctgttgcccagactggtcttgaactcttggtcacaagcgatcctcttgccttggcctctcaaagtgctggaattacacgcgtgagccattgagcccaaccagataagatgatctttaagggcccttcccatggcaccataatccaagtcagcgagactgtggctatagcaagtttaacataaccagatacgctagtattatgggctgcatggtgtgccccccacccctaattcatgtattgaagccatgaccctccagaccttagaggtgaccttattggaaccagagtctttacagaggtgatcaagttaaaatgaggtcactagaggccaggcactgtggctcacacctgtaatcccagcacttcgggaggccgaggcaggcagataatgagcccaagagaccgagaccatgatgtccaacatggtgaaaccctgtctctactaaaaatacaaaaattagccaggcgtggtggtgtgggcctgtagtcccagctactcaggaggctgaggcaagagaatcgcttgaacccggaaggcagagattgcagtcagccaagatcatgccactacactccagcctgggtgacagagtgagactctatctcaaaaaaataaaaattaaaaaactaaaaacctacagtaccgccttttacataatgcaatggtttggtaagcacatgcaccccagggaggtagtggcagattcagtcaaccttcccagcagcgtggagacgcagtcaggcatagcaggtgttgatgtggtttgaacccacagcttggctcaaatccacactcccctacttagtaccgagtgaagccacttaccctctaagtgccttacttttcttttcttttcttttttcttttttcgagacagagtctcgctctgtcacccaggctggagtgcagtggcatgatcttggctcactgcaaacttcgccttccaggttcaagcaattctcctgcctcagccttccaagtagctgggattacaggcgcccaccaccatgccgggctaatatttgtatttttgatagagatggggtttcaccatattgcccaggctggtctcgaactcctgacctcaagtgatctgtctgcctcggcctcccaaagtactaggattagaggcatgagccaccacacctggccacttttcttatctatatttgttatgtggatgacttgtgttaacgcaaataagatgctgctcgtcatctttaaagaaaataggtggcaacctgttatagcaagtcctgtttttatttgtacttatgaggctttaattaaacgctaagaattaaaatgcacataataatagactttacctcacaaactggcttcaaatattcgatgagacttacatgtattacttaaatgaggttaaatttaaccttttaaaaatgatttattgtggctgggcacagtggctcacacctgtaatcccagcactttgggaggccaaggcagacggatcacttgaggccaggagttgaagaccagcctgaccaacacggcaaaaccccatctccgctaaaaatacaaaaattagccaggcatggtggtgcacacctgtaatcctagctactcaggaggctgagacacaagaatcgcttgaacccgggaggcagaggttgcaaggaggtgagatcacaccactgcactccagcctgggcaatagagtgaggctctgccttaaaacaaagaaaaatgattttgggggatgatggggtgtcactgtgttgaccaggcttgtctcaaactccttgcctcaagcaatccacccacctcagcctcccaagtagctggaactacaggcgcatgccaccacgcctggctaatgtgtgtgtgtgtgtgtgtgtgtgtgtgtgtgtgtgtagaaacaaggtcttactgtgttgtttaagctgctctcaaactcctgggctcaagtgatcctcccacctcggcctcccaaagcattggaattacaggtgtgagccacctcactgagccctccacctttcagctgaacgcagaaaagtacaatcttttaacccaaagcgttcctcacacttagggtcaggaagagcccttcatgccctggaggcaactactaaccctctgctaaacactctgactctgggtgtgagaaacacacctactgtgccccacatatttttccaaatacaacttaatttagccttcacgacaaccctggagtgaaggatcattaactttatttcatagatgtggaaactgagactcagaggcaggaaatgacctccttctggaggctgcaaattctttgatgctcctttgatcaacaggtgggagctggccagaggtggtggctcacacctataatcccagcactttgggaggccaaggtgggaggattgactgaggccaggagtttgaaactagcctgggcaacatagcaagacctcatctctacaaaaaatacacaaattagcagggtgtggtggtgcacacctgtagtcgcagccactcgggaggctgaagtggtagcattgcttgagcccaggaggttgaggctggagtgagccatgatcaagccactgcactccagccgaggagatggagatagaccctgtctcaaacaacaacaaaaaaataggtgaggatcagccaggcatggtggctcacgcctgtaatcctagaactttgggaggccaaggtgggaggattgcttgaggccaggacttcaagaccagcctgggcagcctagcaagatcccatcccttaaaaaaaagtttttaggctgggcatggtcactcatgcctgtaatcctagcactttgggaggccaaggcaggcgggttgcctgagctgaggagtttgagaccagcctgggcaacatggtgaaatcctgtctctactaaaatacaaaaaattagccaggtgtggtgttgggcacctgtaatcccaggtactcaggaggctgaggcaggagaattgcttgaacccaggaggcagaggttgcagtgagccgagagcgcaccactccactccagcctggacaacagagcgagactccgtctcaacaaaaaaatgtttttaattagccagctgtgatgatgcatgcccatgtcccagctacttgggaggctgaagcaggaggattgcttgagcctgggaggtcaaggctgcagtgagctatgattgcgcccctgcactccagcctggacagcggagggagaccctgtctgaaaataaaaaaagaggtgggggcctatgaccccccctttaattttggcccaaccttagtaacaggatagtcattgagtagggcaaaagtgatgttatgatgtttttcagcctccaatttacagtctaaaacatgtcttgggtaaacacagcaagactccatctcaaaaaaaaaaaaagaaaaaaaatcagaagtgaacctgtagcctgtagtgtgttgccaaataaacttatttttagagatacttctttccattttctgtgaggtcatctgcagtttcacatggtagacagacttaggtgagattcttagcaacatagaatgaagagtaaagaggtttgtttatttcacaagggtttattgaaggcctacgatgtgttaaatgctgtaggaaatacccactgatttctcttttcatggaggtttcccgccttctcttaatgagtgatcaattaaactgtttactgggaacttgctaagttaatgaacacacgggatacattctttggatgagcagacattggttgggcagaggggcaagaggagagcagtttagacagagacctgcttatacactgtagtgtctaagagagcttgtgatgttcaggaaacagttgttcactgtgctgcaatataggggacggccagttgcggtggctcacacctgtaatcctagtgctttggaaggccaaggcgggcagatcacctgaggtcaggagttagaaaccagcctggccaacatggtgaaaccccatctctactaaaaacacaaaaattagctgagtgtaatggtggatgcctataatcccagcaacttgggaggctgagacaggagaatcacttgaacttgggaggtggaggttgcagtgagccgagatcatgccattgcactctagcccaggtgacagggtgagactctgtctcaaataataataataataataataataataataataataataataataataataataatgtaggggacttgatgaagggaaaggatcagagagattctgaaaagaaggtagtttggggcccagtgatgactagattttaagtttcatatagtaggaagtggggcactagtaatttttcaagcagaaaaattatttgaccagattcgtgatttcaaaaatagctctggtgatagagtggaggatgggttggagcagggaataaggggaaatgaaaccgttataaaactcttaaagtgggctgggcatggtggctcacgcctgtaatcccagcactttgggaggctgaggcgggcggatcacgaagtcaggagatcgagaccatcctggctaaaacggtggaaccctgtctctactaaaaatacaaaaaattagctgggcatggtggtgggcgcctgtagtcccagccactcaggaggctgaggcaggagaatggtgtgaacccgggaggcagagcttgcagtgagctaagatcgtgccactgcactccagcctgggcgacagggcgacagagcaagaatccgtctcaaaaaaaaaaaaaaaaaaaaaaaaaaaacctcttaaaacaagtacagcaagaactttgagggtctttgctaagacagcagctggcagcttcaatttggagtagggtatcaaaggcaactgtgtataaggaatagttatataactggtatccaatttctgagatgattttgacttaaacattgtgtatttcccagcatactgttggtttttctaattatgtgggaaattatgttgcttttacttttttttttgctcattgcccagcctagggtgcaatgctgcaatctcagctcactgcaacctccgcctcccaggtttaagtgattcttctgcctcagcctcccaagtagctgggattacaggcgcccaccaccatgcctggctaattttttgtatttttggtagagacagggtttcacgacgttggccaggctggtctcaaactcctgatctcaagtgatccacctgcctctgtgtcccaaattgctgggattacaggcatgagccaccgcaccggccatgctttcagttttcaagaaagaagacaccattattgccaaagattttggtaatttgagagatacaatgtatgttttctccatgtggatactagatagtaaggatgtgttgaatttgaagtgtctatccagaagtattttgggtacttgtttaaggattgtaaaacaatgtttccatttctggatataataaatgtatttgttaatataataaatgaatagattagacccataaactatttgcagtgttgagtcatttcccacagttaaaatcaggatgaaaatatatagctgaatacttgctttgtttcttgtaactgatttctttagtacagaacctgctaaggccatcaaacctattgatcggaagtcagtccatcagatttgctctgggccggtggtactgagtctaagcactgcggtgaagaagatagtaggaaacagtctggatgctggtgccactaatattggtaagtttgggagagttttaagccacaagaaatgatcagtgaatgttgttgtagtcaagaaacatttgttattgaaataagactatcaagtgttgatgtagtaataaactattatttttaagttaaagttagcacctattatgtgcctagtacttagctaggtagtaataataataacgacagcttttcttgtgttcttatggtgtgccaggcaggtgttatgctaagaattgcacagaaatatctcatttaatttgcagaatagctgggcgtggtgtctgacgcctgtaatcctagccctttgagaggctgaggtggggggattgcttgaagccaagagttcaagaccaacctggccaacatggggagacctcgtctctattaaaaaataaagcaggccgggtgtggtggctcacgcctgtaatcccagcactttgggaggccaaggcgggtggatacctgaggtcaggaattcgagaccagcctgtccaaaatggtgaaactctgtctctactaaaaatacaaaaattagccagacctggtggcagaagcctgtaatcccagctactggggaggctcaggaatgagaattgtttaaatttgggaggtggaggttgcagtgaaccgagatggtgccactgcacgccagcctggggacagagcaagactctgtctcaaaaaaataaaataaaataaaataaaataaatcctggagtagtggctcacatctgtaatcccagcactttgggaggctgaggggggctgatgctttgaggtcaggagttcaagaccagcctaaccaacgtggtaaaaccctgtctctactaaaaatacaaaaattagccagatgtgatggtgcatggctgtaatctcagctcctcagaaggctgagggaggagaattgcttaaacctgggaggtggaggttgcagtgagccaagatcgattgtgccactgcattccagcctgggtgacaagagcaaaagtccatctcaaaaaattaaaaaaaaaaaaaaaaaaaggaaagaaaaaaaagaaaatgacaaaattaaaaaaaaattattaatctgccaaataactttatgagatagaacttattacctccattttacagttgaggaaattaagggacagtaaatttcctttttttgagattataaagctaataaaatagaatctaggaagtctgattccagaaccagttctgtttttttttcttttttttttttttgagatagagttttgctcttgttgccgaggctgcggtgcaatggcacgatctcaactcactgcaacctccacctcccaggttcaagcgattctcctgcctcagcctcacaagtagctgggattacaggcatgcaccaccacgcctggctaattttgtatttttagtagagatagagtttctctacgttggtcaggctggtctcgaactactgacctcaggtgatccgctcgctttggtctcccaaagtgctgggattacaggcatgaaccactgcgcccggcccccgttctccttactgggtatgttaaaattatttctttcaaaggaaaaggctggtcaaagtgcaacggtctttacaactaattgatcacaaccagttacagatttttttgttccttctccactccaactgcttcacttgactagtgtaaggaaaaaaaaaagaggaaagaaagaaaatgctaaactatttaatctgggctagtaaatggccagaaagaactttataaaaatgaaatatacaaaatgacactagtatgtttaactaaaggtatagttacgacacttaaatttgcacgttataaataatatcaatataaaaactgatagcgtgggtccatttttaataaatatataaatattttaaactttctagatctaaagcttaaggactatggaatggatctcattgaagtttcaggcaatggatgtggggtagaagaagaaaacttcgaaggcttaagtaagttaactttctaatcctattacaaaataattgggccacatgtcttagaattttgagtaacactgtcttgggaaacacaaaaacagttttttaaagccagttactagatatcatgtatatttgttgttatagcacttgagatatcttagtccttactttacagtctctttcagctctgaaacatcacacatctaagattcaagagtttgccgacctaactcgggttgaaacttttggctttcgggggaaagctctgagctcactttgtgcactgaggtgagaaaatatttttatccattcacttgaccccttagaaaaacctctctgaaaattaattggaatcattattatttacaattttctatctcaatatctcagcttctagcttctgaattctgttttgtctcactgccaatctaagtcctagtacttctgaaatgtgagcaataaatgaatgaaatgaagcaaatagtattgtttaaaaaattggttacccttattaaaacagtaacttctcaatttgaacataacatatagataataaatgatagttaccattggttttcattatcaatttttagggaaacatttcaccaaagcactatttaattacagcacagatactaaatttttataaataattacatgcacacacacatatatatacatatatatacatatatatacatatatatacatatatatacacatatatacacatatatacatatatatacatatatacatatatatacatatatacatatatacatatatatatacatatatacatatatacatatatatatacatatatacatatatacatatatatacatatatacatatatacatatatatacatatatacatatatatacatatatatatacatatatatgtatatatatatatatatttttttttttagacagagtcgcactctgtcacccaggctggagtgcagtggcacagtctcagctcactgcagtctctgcctcccaggttcaagtgactttcgtgactcagcctcctgaagagctgggactatagcgtgcaccaccactcctggctaatttttgtatttttagtagagatggggttttgccatgttgcccaggctggtctggaactccaggcctcaagtgatctgccctccttggcctcccaaagtgctggaattacaggcacgagccaccgcaccctgccctacatatacattttaattataatatcttttggattctttaaaaaaaattttaaaaattttaaaaaattctttaaaaaaattcttttaaaaaattttgtttgaagagtaataacaaaacaaatctctatttgagaatcaataaatcttgagatcatttatggttttgcaattcaacctgaaaaatgaagtcaaagcttttatcaaaacaaagcatgtttagtgctctctgtctcactgtcttttagatgccagaccttagattttgtgatgactcctcaaccgtttagatctcggttatctcagagggatcatcagctttttaagaaaattttgagagaaaagcaagtgaagaaaagagtagtcagtgcccaacatcatggatctctcactgaacacaccatgcctggtattctctcacagtgatgtcaccatttctacctgccacgtatcggcgaaggttgggactcgactggtgtttgatcacgatgggaaaatcatccagaaaaccccctacccccaccccagagggaccacagtcagcgtgaagcagttattttctacgctacctgtgcgccataaggaatttcaaaggaatattaagaaggtacagtaaattaatcctggttttcaagagtattggttaatgcacgtgagcaaaagatttactaaagatgtttattcttcagttgattctcttcccataatttattgagaaatgctttatttgcatttctcattaaagacttaacttcaggatgatttacttttttctttttatcacataatgtttattaggactgggaaacatagtgagactctgtctctatgaaaaattaaaaaaaaaattgactgggcatggtggcatgcacctgtagttccagctacttgggaggctgaagtgggaggatcacctgagcccaggaacttgagactgcagtgagctatgattgcgtcactacacttcagactgtgagacagagtaagaccctgtctggaaaaatatatatacatatatatacattttttttattttttatttttatctttttttgagatggagtctcactttggcgccctggctgcagtgcagtggcgcgatctcagttcactgcaacctccacctgccaagttcaagcgattctcctgcttcagccttctgagtagctaccattacaggcgcgcgccaccacgcccggctaatttttgtattttcagtggagacggggttccaccatgttgtccaggctggccaggctggtcttgaattcctgccctcaggtgatccgcccacctcggcctctcaaagtgctgggattacaggcgtgagccaccatgcctgaccttatgtacttatatttttatgagaatatttctcttggttttctgataaatgagttactggaacccttatgaatttgaatgcaaatgaaacagctaaatgttatataattgttgtgtttaaaaagcagattataaaactgtctgtattatatgattacagttttataaaaacaaaacaggcctaaatgtgtatagtataaagactgaagagtcagcacttccatgttctcagcggttatccttggatgtgagatctcatgcactttttgctctcttctttgtgcctttccattttgcatgcgtatttcttataatctaaaaagttacttaaacatatgcagctaaaaactttttttacttgtaaagcgtttggtgctaattttaacttttttttttagacggagtcttctcactctgtcgcccaggctggagtgcagtggtgtgatcttggctcactgcaacctccgcctcctgggttcaagtgattctcctacctcagcctcccaagtagctgggattataggtgtgtgtcaccacacccagctaatttttgtatttttagtagagatggggtttcaccatgttggccaggctggtcttgcacccctgacctcaagtgatctgcccacctcagcctcccaaagtgctgggattacaggcgtgagccaccacgcctggcttttttttttaaagcttttttgtaagtcagccagcaagaacacaggaggaagtactcaaatctcccttacacagctgggggctgtgtcaggttttataagcatagggtaatgaggtgtgatttgattggatcttgcaataaagtaatgctgggaggtgtgatctgactggatcctgccatggggtgacaccaaaactcaatctgattggatcctggctcctgcctgggggtgtctggttcttaaatcggtccgagctcttcaggctgagctcttaggttccactccacggtggcacgcgtggttaacctgggcatgcacagggtacatgaccttcaacctgcaggtcgatggcaattggaaaacaactgacaacttcattacataaaagttgaactgattcgggtgcggtgactcacgcctgtaatcccagcactttgggaggccaaggcaggtggatcacctgaggtcgaggagttcaagaccagcctggccaaaatggtgaaaccccgtctctactaaaaatataaatattagccaggcgtggtggcgcacccttgtaatcccagctaccccagaggctgaggcagcagaatgcttgaacctaggacgtggaggttgcagtgagctgagatcgtgccattgcactccagcctgggtgacaagagtgaaactccatcaaaaaaaaaaaaagttgaactagatttggtctgatgcagttacagatttacaaaccgcgtcccaccctcctgccaacaccttccactcctcattcttgagggattagggatggaggtcatgcttctgtatcgacttcatgctgaccaggggcacttagtcccctaaagtgagaggaatgaaactcttgggcttctgagttcagatgagttctggggtcacccggagtagcttgaaaggctggtattgttgtaatacaagctgaaggtggaagtgttggatcctggaggacaaacagctcaccatccatttaaataaataggaccaaaaagtaacagaacagtggccacgaggggccccaacagaggaagaaaccaggtgaggtgtggtatagtggactcgactgccttctaaatctcagtggttgtccgggtgcggtggctcacgcctgtaattccagcaaaagaagagccgaggcagggtgatcacgaggtcaggagttcaagaccagccgggcaaacatggtgaaaccccgtctctactgaaaatacaaaaattagccaggtgtggtggcgtgtgctgtagtcccagctactagggaggctgaggcaggagaattgcttgaacctgggaggcggaggttgcagtgagccgagattgtgccactgcactccagcctaggtaacagagcaggaccccatctcagtcaatcaatcaatctcagtggttgaactacccttgatatggttcagctctgtatccccaaccaaatctcatgtccaattgcaattcccagtgttgagggagggacctggtgggagatgattggctcatggcggctgacgtcccccttgctggtctcgtgatagtgagtgagcgctcatgggatctggttgtttagaagcatgcagcacctcctgcttcactctctctgtctctcctgctccaccatggccagaaacgtgcctgcttccccttcgccttctgccgtgattgtcagtttcttgagggctccccagccatgcttcctgtacagcctgcaaaactgtgagtcaattaaacctcttttcttcataaattccccagtttccagtagttctttatagcagtgtgaaaacagactaatggacccttctggttgaaggaatgtagccattctgcttgtttaagtatttcctttctattcatctctatttcccgggaggtgtttatccaagtgcaataggagatattggtgactgcagagtcccctcagtgttctgctagtaaatagttgaaggttgatcagtgatctccagcattttcagtctggcatggaaaagcccccatgtaactggtaaaggtatcagtaagcaccaggaggtatctaaatccaccaggagccataggcatcatgttgatgtccatttaccagtcttccctggcaagattctctgaattgtactgccttggccaaaagaggtatgggaggggctgggcacagtggctcacgcctgtaatcccagcattttgggagaccaattcgggtagatcattagaggtcaggggttcaagaccatcctggccaacatggtgacattccatctctactaaaaatacaaaaagtcagcggggtttggtgttgggtgcctgtaatcccagctactcgggaggctgaggcaggataatcacttgaacctgggaggaggaggaggtggcagtgagctgagatctcgccattgcactccagcctgggcaacaagagcgaaacttcatctc

SEQ ID NO: 1711 - DNA, 24218 bp, Homo sapiens
caggaggcggggcgcctgtgggagccgtggagggcactttcccagtccccgaggcggatccggtgttgcatccttggagagagctgagagctggaggtgagctgggctcgcggtcgcccctctcgcgcgccctctttgagaaccacggcttccaacctccctggaaatggggggaacatggccgaggcgcgtggcgaggtcacctcgtggaggccccggagcggcatcctcagcgccccagcgatccggtgcccattaggtgcgccttgaagccgaggcaagctccttcggggtgctgggctgcgggcaaagaattcggccctgtgaagagttgggttcggcctgtctcaggccctgcccacatcccatcacagggccgtggacttgaagccggaacgtgaaatccccatagactgaatgcatttcctttctacctgttctccctccccttttatttttatttttatattattttatttttaatttttattttatttttttgtagagacggggatttcgctatgttgcccaagctggtctggaactccggagctcaagcagtccgcccgccttggccccccaaagcgctggaattacaggcgtaatgcactgtgcctggccttttaaaaaaaaattgaggttattttggggacagtagagcatccagacatatcctaatttgcgtagctgctcagttttaaaaaatgcaatgcatttttacctgttagggtatgtgatttctggctggtaagctacaccgaatcttggctagcacagttgaattccatgtcagatttgtaaacgcaaatttgctctctgcatttaaatatattagatatatttaggtaactacatttaaatgtattgagacatttaaataaatttgccgtctgtatctaaatatctgaagtggaccaggtgcggtggctcacacctataatcccatcactttgggaggccaaggcaagtggatcatgaggtcaggagttcacgaccagcctggccaacatggtgaaatcccatttctactaaaaatacaaaaattagctgggcgtggtggcaggcgcctgtaatcctagctacttgggaggctgaggcaggagaatcgctggaacccaggagacagagattgcagtgagctgagattgcaccactgcagtctagcctgggtgacacagcaagactccatctcaaaaaaaaaaagaaaaaaaatcagaagtgaacctgtagcctgtagtgtgttgccaaataaacttatttttagagatacttctttccattttctgtgaggtcatctgcagtttcacatggtagacagacttaggtgagattcttagcaacatagaatgaagagtaaagaggtttgtttatttcacaagggtttattgaaggcctacgatgtgttaaatgctgtaggaaatacccactgatttctcttttcatggaggtttcccgccttctcttaacgagtgatcaattaaactgtttactgggaacttgctaagttaatgaacacacgggatacattctttggatgagcagacattggttgggcagaggggcaagaggagagcagtttagacagagacctgcttatacactgtagtgtctaagagagcttgtgatgttcaggaaacagttgttcactgtgctgcaatataggggacggccagttgcggtggctcacacctgtaatcctagtgctttggaaggccaaggcgggcagatcacctgaggtcaggagttagaaaccagcctggccaacatggtgaaaccccatctctactaaaaacacaaaaattagctgagtgtaatggtggatgcctataatcccagcaacttgggaggctgagacaggagaatcacttgaacttgggaggtggaggttgcagtgagccgagatcatgccattgcactctagcccaggtgacagggtgagactctgtctcaaataataataataataataataataataataataataataataatgtaggggacttgatgaagggaaaggatcggagagattctgaaaagaaggtagtttggggcccagtgatgactagattttaagtttcatatagtaggaagtggggcactagtaatttttcaagcagaaaaattatttgaccagattcgtgatttcaaaaatagctctggtgatagagtggaggatgggttggagcagggaataaggggaaatgaaaccgttataaaactcttaaagtgggctgggcgtggtggctcacgcctgtaatcccagcactttgggaggctgaggcgggcggatcacgaagtcaggagatcgagaccatcctggctaaaacggtgaaaccctgtctctacaaaaaatacaaaaaattagctgggcatggtggtgggcgcctgtagtcccagccactcaggaggctgaggcaggagaatggtgtgaacccgggaggcagagcttgcagtgagctaagatcgtgccactgcactccagcctgggcgacagggcgacagagcaagaatccgtctcaaaaaaacaaaaacaaaaaaaaaaaaactcttaaaacaagtacagcaagaactttgagggtctttgctaagacagcagctggcagcttcaatttggagtagggtatcaaaggcaactgtgtataaggaatagttatataactggtatccaatttctgagatgattttgacttaaacattgtgtatttcccagcatactgttggtttttctaattatgtgggaaattatgttgcttttacttttttttttgctcattgcccagcctagcgtgcaatgctgcaatctcagctcactgcaacctccgcctcccaggtttaagtgattcttctgcctcagcctcccaaatagctgggattacaggcgcccaccaccatgcctggctaattttttgtatttttggtagagacagggtttcacgacgttggccaggctggtctcaaactcctgatctcaagtgatccgcctgcctctgtgtcccaaattgctgggattacaggcatgagccaccacaccggccatgctttcagttttcaagaaagaagacaccattattgccaaagattttggtaatttgagagatacaatgtatgttttctccatgtggatactagatagtaaggatgtgttgaatttgaagtgtctatccagaagtattttgggtacttgtttaaggattgtaaaacaatgtttccatttctggatataataaatgtatttgttaatataataaatgaatagattagaaccataaactatttgcagtgttgagtcatttcccacagttaaaatcaggatgaaaatatatagctgaatacttgctttgtttcttgtaactgatttctttagtacagaacctgctaaggccatcaaacctattgatcggaagtcagtccatcagatttgctctgggcaggtggtactgagtctaagcactgcggtgaagaagatagtagaaaacagtctggatgctggtgccactaatattggtaagtttgggagagttttaagccacaagaaatgatcagtgaatgttgttgtagtcaagaaacatttgttattgaaataagactatcaagtgttgatgtagtaataaactattatttttaagttaaagttagcacctattatgtgcctagtacttagctaggtagtaataataataacgacagcttttcttgtgttcttatggtgtgccaggcaggtgttatgctaagaattgcacagaaatatctcatttaatttgcagaatagctgggcgtggtgtctgacgcctgtaatcctagccctttgagaggctgaggtggggggattgcttgaagccaagagttcaagaccaacctggccaacatggggagacctcgtctctattaaaaaataaagcaggccgggtgtggtggctcacgcctgtaatcccagcactttgggaggccaaggcgggtggatacctgaggtcaggaattcgagaccagcctgtccaaaatggtgaaactctgtctctactaaaaatacaaaaattagccagacctggtggcagaagcctgtaatcccagctactggggaggctcaggaatgagaattgtttaaatttgggaggtggaggttgcagtgaaccgagattgtgccactgcacgccagcctggggacagagcaagactctgtctcaaaaaaataaaataaaataaaataaaataaatcctggagtagtggctcacatctgtaatcccagcactttgggaggctgaggggggctgatgctttgaggtccggagttcaagaccagcctaaccaacgtggtaaaaccctgtctctactaaaaatacaaaaattagccagatgtgatggtgcatggccgtaatctcagctcctcagaaggctgagggaggagaattgcttaaacctgggaggtggaggttgcagtgagccaagatcgattgtgccactgcattccagcctgggtgacaagagcaaaagtccatctcaaaaaattaaaaaaaaaaaaaaaaggaaagaaaaaaaagaaaatgacaaaattaaaaaaaaaattattaatctgccaaataactttatgagatagaacttattacctccattttacagttgaggaaattaagggacagtaaatttcctttttttgagattataaagctaataaaatagaatctaggaagtctgattccagaaccagttctgtttttttttcttttttttttttttgagatagagttttgctcttgttgccgaggctgcggtgcaatggcacgatctcaactcactgcaacctccacctcccaggttcaagcgattctcctgcctcagcctcacaagtagctgggattacaggcatgcaccaccacgcctggctaattttgtatttttagtagagatagagtttctctacgttggtcaggctggtctcgaactactgacctcaggtgatccgctcgctttggtctcccaaagtgctgggattacaggcatgaaccactgtgcccggcccccgttctccttactgggtatgttaaaattatttctttcaaaggaaaaggctggtcaaagtgcaacggtctttacaactaattgatcacaaccagttacagatttttttgttccttctccactccaactgcttcacttgactagtgtaaggaaaaaaaaaaaaaaagaggaaagaaagaaaatgctaaactatttaatctgggctagtaaatggtcagaaagaactttataaaaatgaaatatacaaaatgacactagtatgtttaactaaaggtatagttacgacacttaaatttgcacgttataaataatatcaatataaaaactgatagcgtgggtccatttttaataaatatataaatattttaaactttctagatctaaagcttaaggactatggaatggatctcattgaagtttcaggcaatggatgtggggtagaagaagaaaactttaaaggcttaagtaagttaactttctaatcctattataaaataattgggccacatgtcttagaattttgagtaacactgtcttgggaaacacaaaaacagttttctaaagccagttactagatatcatgtatatttgttgttatagcacttgagatgtcttagtccttactttacagtctctttcagctctgaaacatcacacatctaagattcaagagtttgccgacctaactcgggttgaaacttttggctttcggggggaagctctgagctcactttgtgcactgaggtgataaaatatttttatccattcacttgaccccttagaaaaacctctctgaaaattaattggaatcattattatttacaattttctatctcaatatctcagcttctagcttctgaattctgttttgtctcactgccaatctaagtcctagtacttctgaaatgtgagcaataaatgaatgaaatgaagcaaatagtattgtttaaaaaattggttacccttattaaaacagtaacttctcaatttgaacagaacatatagataataaatgatagttaccattggttttcattatcaatttttagggaaacatttcaccaaagcactatttaattatagcacagatactaaatttttataaatgattacatgcacacacacacacacacatatatatatacatatatatatatatatatatatatttttttttttttttagacagagtcgcactctgtcacccaggctggagtgcagtggcacagtctcagctcactgcagtctctgcctcccaggttcaagtgactttcgtgactcagcctcctgaagagctgggactatagcgtgcaccaccactcctggctaatttttgtatttttagtagagatggggttttgccatgttgcccaggctggtctggaactccaggcctcaagtgatctgccctccttggcctcccaaagtgctggaattacaggcacgagccaccgcaccctgccctacatatacattttaattataatatcttttggattctttaaaaaaattttttaaaattttaaaaaattctttaaaaaaattcttttaaaaaattttgtttgaagagtaataacaaaacaaatctctatttgagaatcaataaatcttgagatcatttatggttttgcaattcaacctgaaaaatgaagtcaaagcttttatcaaaacaaagcatgtttagtgctctctgtctcactgtcttttagatgccagaccttagattttgtgatgactcctcaaccgtttagatctcggttatctcagagggatcatcagctttttaagaaaattttgagagaaaagcaagtgaagaaaagagtagtcagtgcccaacatcatggatctctcactgaacacaccatgcctggtattctctcacagtgatgtcaccatttctacctgccacgtatcggcgaaggttgggactcgactggtgtttgatcacgatgggaaaatcatccagaaaaccccctacccccaccccagagggaccacagtcagcgtgaagcagttattttctacgctacctgtgcgccataaggaatttcaaaggaatattaagaaggtacagtaaattaatcctggttttcaagagtattggttaatgcacatgagcaaaagatttactaaagatgtttattcttcagttgattctcttcccataatttattgagaaatgctttatttgcatttctcattaaagacttaacttcaggatgatttacttttttctttttatcacataatgtttattaggactgggaaacatagtgagactctgtctctatgaaaaattaaaaaaaaaaattgactgggcatggtggcatgcacctgtagttccagctacttgggaggctgaagtgggaggatcacctgagctcaggaacttgagactgcagtgagctatgattgcgtcactacacttcagactgtgagacagagtaagaccctgtctggaaaaatatatatacatatatatacattttttttattttttatttttatctttttttgagatggagtctcactttggcgccctggctgcagtgcagtggcgcgatctcagttcactgcaacctccacctgccaagttcaagcgattctcctgcttcagccttctgagtagctaccattacaggcgcgcgccaccacgcccggctaatttttgtattttcagtggagacggggttccaccatgttgtccaggctggccaggctggtcttgaattcctgccctcaggtgatccgcccacctcggcctctcaaagtgctgggattacaggcgtgagccaccatgcctgaccttatgtacttatatttttatgagaatatttctcttggttttctgataaatgagttactggaacccttatgaatttgaatgcaaatgaaacagctaaatgttatataattgttgtgtttaaaaagcagattataaaactgtctgtattatatgattacagttttataaaaacaaaacaggcctaaatgtgtatagtataaagactgaagagtcagcacttccatgttctcagcggttatccttggatgtgagatctcatgcactttttgctctcttctttgtgcctttccattttgcatgcgtatttcttataatctaaaaagttacttaaacatatgcagctaaaaactttttttacttgtaaagcgtttggtgctaattttaacttttttttttagacggagtcttctcactctgtcgcccaggctggagtgcagtggtgtgatcttggctcactgcaacctccgcctcctgggttcaagtgattctcctacctcagcctcccaagtagctgggattataggtgtgtgtcaccacacccagctaatttttgtatttttagtagagatggggtttcaccatgttggccaggctggtcttgcacccctgacctcaagtgatctgcccacctcagcctcccaaagtgctgggattacaggcgtgagccaccacgcctggcttttttttttaaagcttttttgtaagtcagccagcaagaacacaggaggaagtactcaaatctcccttacacagctgggggctgtgtcaggttttataagcatagggtaatgaggtgtgatttgattggatcttgcaataaagtaatgctgggaggtgtgatctgactggatcctgccatggggtgacaccaaaactcaatctgattggatcctggctcctgcctgggggtgtctggttcttaaatcggtccgagctcttcaggctgagctcttaggttccactccacggtggcacgcgtggttaacctgggcatgcacagggtacatgaccttcaacctgcaggtcgatggcaattggaaaacaactgacaacttcattacataaaagttgaactgattcgggtgcggtgactcacgcctgtaatcccagcactttgggaggccaaggcaggtggatcacctgaggtcgaggagttcaagaccagcctggccaaaatggtgaaaccccgtctctactaaaaatataaatattagccaggcgtggtggcgcacccttgtaatcccagctaccccagaggctgaggcagcagaatgcttgaacctaggacgtggaggttgcagtgagctgagatcgtgccattgcactccagcctgggtgacaagagtgaaactccatcaaaaaaaaaaaaagttgaactagatttggtctgatgcagttacagatttacaaaccgcgtcccaccctcctgccaacaccttccactcctcattcttgagggattagggatggaggtcatgcttctgtatcgacttcatgctgaccaggggcacttagtcccctaaagtgagaggaatgaaactcttgggcttctgagttcagatgagttctggggtcacccggagtagcttgaaaggctggtattgttgtaatacaagctgaaggtggaagtgttggatcctggaggacaaacagctcaccatccatttaaataaataggaccaaaaagtaacagaacagtggccacgaggggccccaacagaggaagaaaccaggtgaggtgtggtatagtggactcgactgccttctaaatctcagtggttgtccgggtgcggtggctcacgcctgtaattccagcaaaagaagagccgaggcagggtgatcacgaggtcaggagttcaagaccagccgggcaaacatggtgaaaccccgtctctactgaaaatacaaaaattagccaggtgtggtggcgtgtgctgtagtcccagctactagggaggctgaggcaggagaattgcttgaacctgggaggcggaggttgcagtgagccgagattgtgccactgcactccagcctaggtaacagagcaggaccccatctcagtcaatcaatcaatctcagtggttgaactacccttgatatggttcagctctgtatccccaaccaaatctcatgtccaattgcaattcccagtgttgagggagggacctggtgggagatgattggctcatggcggctgacgtcccccttgctggtctcgtgatagtgagtgagcgctcatgggatctggttgtttagaagcatgcagcacctcctgcttcactctctctgtctctcctgctccaccatggccagaaacgtgcctgcttccccttcgccttctgccgtgattgtcagtttcttgagggctccccagccatgcttcctgtacagcctgcaaaactgtgagtcaattaaacctcttttcttcataaattccccagtttccagtagttctttatagcagtgtgaaaacagactaatggacccttctggttgaaggaatgtagccattctgcttgtttaagtatttcctttctattcatctctatttcccgggaggtgtttatccaagtgcaataggagatattggtgactgcagagtcccctcagtgttctgctagtaaatagttgaaggttgatcagtgatctccagcattttcagtctggcatggaaaagcccccatgtaactggtaaaggtatcagtaagcaccaggaggtatctaaatccaccaggagccataggcatcatgttgatgtccatttaccagtcttccctggcaagattctctgaattgtactgccttggccaaaagaggtatgggaggggctgggcacagtggctcacgcctgtaatcccagcattttgggagaccaattcgggtagatcattagaggtcaggggttcaagaccatcctggccaacatggtgacattccatctctactaaaaatacaaaaagtcagcggggtttggtgttgggtgcctgtaatcccagctactcgggaggctgaggcaggataatcacttgaacctgggaggaggaggaggtggcagtgagctgagatctcgccattgcactccagcctgggcaacaagagcgaaacttcatctcaaaaaataaaacaagaagtctgggtgtggtggctcgtgcctgtaatcccaggactttgggaggccaagatgggtggatcatgaggtcaggagttcaagaccagcctggcctagatggtgaaaccctgtctcgagtaaaaatacaaatattagctgggcatggtggcacacacctgtaatctcagctactcagaagtctgagacagaagaattgccaaaacccgggagggagaggttgcagtgagccgagatcgcgccactgcactctagcctgggcgacagagcaagactccgtctcgaaagaaagaaagagaaaggaaattccccagggaagtacctcggcttatttcatgaagaggtactgaaggaagcagaggcatgtggaggacttccccacctcgtgcagctatttgggccgtggcgtctgaaatttcttatttcagagtcacccctttgatgaccttggcagtggactgcagtcatctgtttaggcctctccatggcccgtgtcaatgccgatatttctgtctgttgcacatttgatttccttgttgttggcatttagaaggccccctgtttcccagatcacaccacgggcatggaccgcagagattgcatcttgtgagtctgtagaaacagtcaaggccttgtcctctcttaggtccagagctcaggtgaatgcagattttcccggccatctgtgctgaagtccctgtggggaggctcctggctggtttcctgtaggtagacagctacacatcctgcccttcattggcttcttttcatgaagctcctgctgtctacaaaacatgtctcccttttcttcttgaaccacatctctgttattgaaactctagaagtcagccaggcacagtggctatgcctgtaatcccagcactttgggaggccaaggtgggtggatcacctgaggtcaggagttcaagaccagcctggcccacatggcgaaaccctgtctctaatacaaatactaaaattagccaagcatggtggccactgcactccagcctgggtgacagagcaagactctgtctcaaataaagaaagagaaagtatcatgcttttcagagttctgtgggttgttatggtgaattatcaaacctgaggacgtggtgggaacctccaaatttgcagccagttggtgagaagtacatgcggtctgtggacacccaagcttgcagctgcatctgaagcgagggcagcctagcgggggctggtggccttaacctgtggcatttgatgtaacatcagggagttgacatcagaattacgtcacacaggccaggtgcagtggctcatgcttataatcccagcaattagaaaggcaagataagaagattgcttgagcttgagtctgagcccacagtgagctatgaccgcaccactgcaccccagtctgggtgacagcacaagaccccgactccaaaaataaaaaagaaaaatcacaaagaattgcatggcagagtgcctgtctttcacagcttgaactgttgcaggaactttctttttttctttctttttttttttttttttttgtgatggagtctcgcgctttcacccaggctggagtgcagtggcgcgatctctgctcactgcaggctccgcctcctgggttcacaccattctcctgcctcagcctccggagtagctgggactacaggcgcctgccaccgcgcccagctaattttttgtatttttagcagagatggggtttcaccgtattagccaggatggtcttgatctcctgacctcatgatccgcccacctcagcctcccaaagtgctgggattacagtcctgagccaccgcgcctggactttttttttttttttttttttttgagaggggttggggagacatattctctgctagtgattctcctgcctggtctcgaactcctgctgggatcacaggcgtgagccaccacgcccagccacctttagagttttcttaccacctggttttcctctctcaatatctttctctcatttcctgctttaaaactctagcttggggtctgggcacagtagctcatgcctataatcccagcactttgggagactgaggcgggtggatcacttgaggtcaggagtttgagaccagcctggccaacatggtgaaaccttgtctctactatttttacaaaagttagtcagacgtacaggcggatgcctgtagtcccagctacttgggaggctgaggcaggagaatttgcttgaacgcggaggtgaaagttgcagggagccgaggttgtgccactgcactccagcctgggagacagagcgagactgtctccaaaacaaacaaacaaacaaaaaaaccctgtagcttgggatcagccttctcttctgttgtttttctttaaaaaataaaaattaaaaataggcttcaagtgatcctcccgccatgacctccaaaactgctgggattgtaggtgtgagcactgcacccagccgtatgtttttttctacataaaaaacagcacaggattatcttccaaagctaataaatatgttcaaataagcacaaccccattaaggaaaaatgtcacttgacagcaaataatcaatccagaccacaatatgatcacactcactgtgaaggtgagaaaagttcatctttattatgtttccccaagagatgcactgcactgttctcttgaaaacacacagctcatgtcctcctttagaacacacatcctctttaaagtaacatacaaacatgccaaaacaagataaaaaattccatctgaattctcacatttcaaacatacactaaatatcaaataaaaatttatttttacaagaatttaggggaactaccacatagctataaatgtaatatatatgttaactaagtatcatagataaaaaccatgctccccttcagcagcacgtgtaataatagatacaaagattgaaaggtaaaagatttaggatgaaaagaatcctctcttaaaaaggaaaacaaaattatatgtatgtgtatacaacagttataacacccatcacacagctttgtagaaacagcatctattcaaaaataccagtatttccaaaatatttaaaataatatttaaagtaataataatatttaaataaataaacatatttaataaatatttcaataaataaaataatatttaaataattctatacccatgtttttcaaaataaaccaataaaatagatagtatatattagacgtgttagtatatatatctgagacatgttaaaaatcacaactgaattctcacaattcagtcacaaacctaaacagcaaataaaaatttctatcaccagaattatgtttttttctggtggggaactaccaatagctataaatagaagagattattatggaagtatcatagataaaaagagtgctcgcttcaggagcacatataataatacagaaaaaaatttaaagataataaaagatttaggataaaaagaattctcacttaaaaatgaaaagaaaattatctttaggtatatataacaactataactctcatcaaaaaactctacaggaacagcatgttttcaaaagtacaacaatttccaaactatttgaaataaacctattaataattcaatggccaacattttccaaacaaaccaataaaatgcatagtgtgcatgaagctatctgttacagtctgtggcactcatatttcacaaagaattctgtgccaatctgagcccctgcactgtgccttcaaatgctcctggactgtggcaaccaagtccataagaaataggacctccaggttccgccccagggaggttggcattcagcaatataaaaagggaggtggtgccgcaggaaagggtggaactggaaacactcctggtttcttacttttctccaaggactcctagaagtaccccaccccacccctgctccttggaggacaacgtgatcactgtattcagctctgtcaagaatggtccaggttcttctagatgatctgcacaaatggttcctctcctccttcctgatgtctgccattagcattggaataaagttcctgctgaaaatccacatctcccctgggtccggtgttctggaagtgagagagacaatgtcacacttcaaggaggcagctctctagacaggaaggttattcacgtcccatgtcaagtctagctagagttcagagcaattgagaagtgcaattttatctcctgcctttcattctataccctgcttctgaaccatcgtgttcaactgtgaaactcacactttggtgaccctgactccaaaacttaatacacccaaggtcagccccagtgatctgcttcatagcaaggactttgggtgggtcttcccagggagtagggcaccctcagagaatgtggctttggacttcatcacagctggggccttttgtgtcacttcagatctaaacttgtaaccgtgctagatctgtttctaatgtgacaacatcacgaaccacgagtccagaagcctaatccataatcctccctcctcatgacaaagtctcatgctctgtgctcaacatggttagctgcacaagatgtaaaccaaagcttcactgaaccctcgacccagatcggtaactcaagtgcatcaatcataatgaacctccccgaactcagtagttatgattatttttgaggcagggtctcactctgtcgcctgggctggagtgcagtggcaggatcagggctccctgcagccccgacctcccaggctccagcgatcctcccgcctcagcctcctgagtagttgggagtagagatgcctcccacatcgcctggctaatttttgtatttttgtggagaggggatctcgccacgttgcccaggcttgaagccagatcaagcaattgggttccttggatttccgaaatagaccccaatattctgcctttaccccggaggatgcagatgtaccttctctcaggccgatgacctcaggcctccacggtccctggagctctaggaaaggtgggcgcgatctcgcgcccacacccagtgctctgggtcataagcctggatctggaaaaacaaacgcgctttgagaagacggggactccccaggatacccctctctcccctcgtccagcctccagcccacccgattcctccccacatcctccacgtccccaggccccacccacctcttccaactcctccagggaaacccaagccctgcagcgcatggaacaaaagaagtggaaccgatacttccggaacaaggctatctgagagcagttcttcctggccctcgggttcatgtaacggcataactggaaccaaagctcacggagcaagggtatatgagagcgggtctcctcgtacaggaagtagaagatgttttgtttgggggcctcatcgtcctcctccatgtcattggccagatagctgaggacagaaatcaggttgctgctcaggggcaccaccaggagagacctccggctgaggtcagcttctcagagaggaaggtaagggaccgtccctagctcaggactggcacccaccctgcagagagccatgccttcctcaggagggctctgctggacagagacctgatcaagggcgtctcccactccttcaggatggagacaaaaacccaactggtgaccaagagtggtggcttatgcctggaatcccagcacactgggaggccgaagcaggaggatcacttgaggccaggagtttgagacaggcctgggcaacatagcaagaccctcgtctctattaaaaatataaaaaatacaccagacgcggtggctcatgcctgtaatcccagcgctttggaaggctgaagcaggtggattgcttgagaccaggagtttgagaccagcctggtcaacacagagaaaccccatctatactaaaaatacaaaaatcagcctggtgcggtggcacacccattagtcctagctactcaagaggctgaagcataagaattgtgtgaacccaggaggcggaggttgcagtgagccaagattgggcccctccattccagcctgagagacacagcaacactcttgtcttgataaataaataaataaataaataaataaataaataaataactgtccaggtgtggtggtacagccctgtagtcggagctaatcaagaggctgaggtgggaggatcgcttgagcccaggatatggaggctgcggtgagctatgatctcaccactgcactccagcttaggggacagggcaagtctgtctcaaaaaaaaaaaaagcaattgaatacactgatattttgccaggaccctgccttctacaggcatctagtctaatgggactgggagtaatcaggggagatgacctaatcccaatgtcacgttataataggatgtaactggagagctacgggcatgcagaagttggaagatgagggaaggcatcacagaggctgtggggtgaaccgacttcaaggaatgggtccttcccttcagaaccacatgtgtgcgggacacccagacagaaaacacaaatgcaaagtcaagtggagggcatttggaaggagcagtgaagccaagccaggaaacaccaagatggcgagccagtgtggttgtagagattgtagagagggtggaattggcactgtggaccctggcctcgatagagaaagacatcagctaaggaagttgttcaggtgggcagtgaggttgtcgtgctttggaaagatgttcaggctgcactaggaagccccctggcttggggagagactccaggaaaccccagcagggagcatttgacagtggattcgagtgatgcaagggggacctgaactgtggcctctgtcatgggaacccggaggaggctgatggcttttgcggttgatgtgggaaggagagagagagaagaaccggaaacgtctgcttgctgggggaagtgtcatgtccgctcctccgctccttttcttctccccttaggagcggttcatggttccttttgttttttgttcttttttttttttttttttttttttttttttgagacggagtctcattctgtcgcccaggctggagtgcagtggtgcgatctcggctcactgcaagctccgcctcccaggttcacgccattctcctccctcagtcctcagagtagctgggactacaggcgcccgccaccacacccggctaatttttgtatttttttttttttaagtggagacagggtttcaccatgttagccaggatggtcttgctctcctgaccttgtgatccgcccacctcggcctcccaaactgttgagattacaggcgtgagccaccgcacctggcctgttttactcttgtatttgtacactggcattggagtttggtttttttgcctggtttttttttttttttttggcttttttttttttttttttgagaaaaagtctcactctgttgcccaggctggagtgcagtggctcaaccttagcatactgcaacctccacctcctgggttcaaggggttctcttgcctcagcctcccaagtagcttggattacaggtgcacaccaacatgcccgactgatttttctatttttagtagagacggggttttgccatgttggccaggctggtctcaaactcctgacctcaggtgatccgcttgcctcagcctcccaaagtgctgggattacaggcctgagccaccatgcacagcctgagtttctttttagaaataacagtctaagatactataatcctgtcttttttgtacacagagtaaagaggacaaataggtgaaagaataaatgaaaggctggaatcccacttcccccgctgtcccagggcattggatattgatggataggaggcagcaaaccactcacagagccaggaagaaatgaatgcgttggtattgccaggaggggaggccggcccggctgaaatacgctatgaccatagccaggagatactgatggagagaaaggaacacagagagggagaggtcacatcttgggagaggaagattgtggagatagtggaatgggggtctggggaggggctgcccatcagagaagggacctcagcattggggtgactgtgctcatgtggaaattgcggggtggaggggtattcgaaggtcggatgcaaatccgagaagccggaggaagggttttcggtgatgctcccaggatggtgggctccgatgggatctttggagggggtgtgtctaggtcggctggtgtcaggagggtcttttgtgtgccaggcagagaactgtcccaaggagctgagagtagagggcccaggagcttcagggctgcagccagactgtggcccagggctcagatcccaaaggactcataggggaggcaggggccactcattcactctgcaagagaccagcagaatcctgacggagatgctgacaaatcataaaaagacaaagaatagccgggagtggcagctcaagcctgtgatcccagtactttttgagaggtggagacaggaggatcatgtgagcccaacagttggagaacaacctgggcaacacagcgagaccctgtttctacgaaggtttcaaaaattagttgagcatggtagcatgtgcctagtcccagctcctcaggaggctaaggaaagaggattgcttgagcccaggaattagagtgagctatgatcatgccactgtactccatcctggggagcagagctggactcttgtctcagaaaaaaaaatgtgtgggtgccaagactcaagaccatgggagctggtcagacacagtgctgacgtctgtaatctcagcactttgggaggccaaggcgggtggatcacctgaggtcaggtgttcgggaccaatctggccaacatggcaaaaccccgtctctactaaaaacacaaaaattagccaggcgtggtggttcatgtttgtaatcccagctgcttggaggctgaggtgggagaatcgcttgaacccaggaggcatcagctgcagtgagtcaagatcgagacactgcccttcagcctgggcaacagagcaagactgtgtctcacaaaacaaaaacaaaaacaaaaacaaaaaaaaactgtaggagcatctggtgggaggtggtggagggagaactgtgggtttggaagctgcgccctccccctggccgtgcgttagaacaggaacacagttacatagagaacaaccttaccttgtccgacaccctcagatctttgtcccaggccaggagtcttttaatgacaggatcctctgtgattagagagcagatgtcagtgtgagaagcaggacagggtttccgtgagagcagcagggcagtgaggagaagtgtgcctcccgggggaaagtctcaggattgtggctgcgggtgaggtggatgggagaggggagaatgactttcactgggcaagggagagaggctcctgctctgagactcccctgagaagaggccgaaggaggccctgggtgtgagaatctacaggatgtagagctgggaatcagccaggaccccctccagcagacacggagggaccactgcagagtcataaaggaattcccatcatttcctcatgagacagtcacacatcagggtgtgaccatggccttgggatccctcactatggatggagacacttaggtttagaaaagtcagtaagaaacattaagtttcagagggcacagctgaaaccacttttttgatttttgattttgtttttctttatttgatttttatttttatttatttattaatttattttgagacagagtcttgctctgtgggccaggctggaatgcattggcctgatcttggctcactgcaacctctgcctcctgggtttaagcagttctcctgtctcagcctcccgagtagctggaactacagggatgagctactgtgcccagccttggtttttcttttgacgcagagttttgctctgtcacccaggctggagtgcagtggtgcagtcatagctcactgcagcctcaaagtcctgagttcaagcaatcctcttgcctcagcctcccaacgtgctgggatctcaggcgggagccacagcgcctggcccaaaaccaagctttcttatcccaagcaccgacctttatcaagtctacctaatcctctgttgtctccttaagtgtccctcatgagtgatcacttcagagtcctcccgcatggagagctcacccactggggcatatttttcccattggaaaagtgtggttattggaagtttcctctttagaaagaacaggattggaggtgctctctggggtgtcctcctaccaagcagcctgttgaaggcctcgtagtactcagggagcacgagcgacactcgccgtcgcttcgccttcatcttgaggccacacagcgtctccgccacccaggtctcctcaggctcaggggcgagctccttctctggctcatcatcagattcatccaaacattccctcttccttttccagccaagggacctacgtggggggctgggatctaccccaggggctgagtaaagaaaccaggccaccgtgtaatgcttctgcaactgatcacgttagaccccgaccccaaaccccaaaccactctccatcctccccagcctcgcagactgctggcttctccaagccacctttctgactttctcctctgctcaaccccatgtgccactccttcccctccccattcttccctctctctgtcctcagaacactgcctcatatccttccctggtccctggctctctgagtccctctttttttttttttttgtttcgagacagaatcttgctttgtcacccaggctggagtgtagtggtgcaatctcagctcactgcaacatgcatctcccggattccagttattctcctgcctcagcctctcaggtagctgggattacaggtgcctgccataatgcccagctccattttgtacttttaatagagacagggtttcaccatgttggccaggctggtctcaaactcctggcctcaagtgatccgcctgccttggcttcccaaagtgctgggattacaagtgtgagccactgcacccagcctgaatttctccattcttcccacacaccctccccaggttctccttcctgacctctgacccttcttttttttcttcttttttttttttttttttttttttttttttttttttttttgagatagcatctcacgctgtcacccagactggagtgcagtagcacgatctcggctcactgcaacctcttcctcccaggctcaagtgattctcctgtcttagcctcccaagtagctgggattataggcacacaccactaccgcctggctaatttttgtacttttagtagagatggggtttcaccatgttggccaggctggtcttgaactcctgacctcaggtgatctgcccgcctcagcctcccaaagtgttggggttacaggggtgagccaccacgcctggcccccttccttcatcttagtcaatcctatgccacctcttcttcctccagtcccctcacctgatggtcccgacacttcatcatccaccacctcctggagggggtaccctgaggtgctccgctgggggctctgctcttcctggggctgcggttgatggctcatcatgatctttcccaaaatctgtcccatctcaccaaacctagtctctgttctgtccttggtcttcttctggacactgctgggatccagaagagtgtgttatcaattctcgaggctgggagaagtcaggagtggagaacagctctgagaagttactgttgtccaactgaactcccaggtgccgacagagtccggtccctccaatcaggaaggtcggaatctctgatgtcatcgctcatgccaacctggcaaccagtttgaaaaaaaacacatgtaactgccaggctgatctcttgtcctggagatcctgggtgaatggtatctcctgccactgtcccaacctcagaccactgtccaaaagcatcttcagggtctccgcatccctctgttccctgtcccagcagaggctgtgtcctctccactcaaagcttgaagcgtgttggggtctcctcttctctgtacatgcccgtttcagagtccagtctggtgggagagggatcaggatgggaaagaaaagtagggtaagcagaaacgatgaaaccttacaagagtgagattatcatgtacaagagatcccaggaacattgacttgatgaaaaagtcacatcagagcactcaatttggcagaggttttctgccgaatgtctactgacattcactgtccgagattctgtactgggggtacacgcgtcctctgccctaaggcatctttgagtccaagagatactttgaggactggaaatcataggaaactgcccatgagttcacacatatttccaatggtgtccccaatttcagggagtccacggatcacctaaagccagcccctccagtttggctaagaaactctatatatcaagttttgtatcatatgtattgctcttaactcagaaaattccaccatttatagcagtggtttatttatttataccattgaaggaaatggtttatttatgaatctatattacggatattctataagatactgggtgtacaaaaagactaagtcgaaaaatctcagctgtgcacagtggctcatgcttgtaatcccatctctttgggtggccaagggaggaagactgcctgaggccagcagttcaagaccagtataggcaacatagcaagagcccatctctaaaacaaaacaaaacaaaacaaaacaaaattagccaggtgtcgtggctggcacctgtgttccaacaacttgagagactgaggtggcaggaggattgcttgagcctaggagttaggggctgcagtgagctgtgatcgtgacaccgcactccagtctgggcaacacagcaagaccttgtgtcaaaaaaatttttttaattaaatataaaagagtttcatgacattcagagaccatccaaagaacctgtgggttctggccaggcacagtggctcacgcctgtaatcccagcgctttgggaggccatagcaggtggatcgcttgaggtcaggagtttaagagcagcctggccaacatggtgaaaccccatctcttctaaaaatacaaaaaattagtcaggcatggtggtgggtgcctgtaatcccagccactcaggaggcggggacagcagaatggcttaaacttgggaggcggaggttgcagtgagccaaggtcgcaccattgcactccagcctgggcaacaagagcaaaactacatctcaaaaaaaaaaaacaaaaaaaaaacaaaaagaacctgtggatgagtt

SEQ ID NO: 1712 - DNA, 4418 bp, Homo sapiens
tttcttatcccaagcaccgacctttatcaagtctacctaatcctctgttgtctcctaagtgtccctcatgagtgatcacttcagagtcctcccgcatggagagctcacccactggggcatatttttcccattggaaaagtgtggttattggaagtttcctctttttagaaagaacaggattggaggtgctctctggggtgtcctcctaccaagcagcctgttgaaggcctcgtagtactcagggagcacgagcgacactcgccgtcgcttcgccttcatcttgaggccacacagcgtctccgccacccaggtctcctcaggctcaggggcgagctccttctctggctcatcatcagattcatccaaacactccctcttccttttgcagccaagggacctacgtggggggctgggatctaccccaggggctgagtaaagaaaccaggccaccgtgtaatgcttctgcaactgatcacgttagaccccgaccccaaaccccaaaccattctccatcctccccagcctctcagactgctggcttctccaagccacctttctgactttctcctctgctcaaccccatgtgccactccttcccctccccattcttccctctctctgtcctcagaacactgcgtcatatcgttccctggtccctggctctctgaggccctctttttttttttttgtttcgagacagaatcttgctttgtcacccaggctggagtgtagtggtacaatctcagctcactgcaacatccatctcccggattccagttattctcctgcctcagcctctcaggtagctgggattacaggtgcctgccataatgcccagctcaattttgtacttttagtagagacggggtttcgccatgttggccaggctggtctcaaactcttggcctcacgtgatccgcctgccttggcttcccaaagtgctgggattacaggtgtgagccactgcacccagcctgaatttctccattcttcccacacaccctccccaggttctccttcctgacctctgacccttcttttttttcttcttctttttttttttttttttttgagacagcgtctcactctctcacccagactggagtgcagtagcacgatctcggctcactgcaccctcttcctcccaggctcaagcgattctcctgtctcagcctcccgagtagctgggattataggcacacaccactaccgcctggctaatttttgtacttttagtagagatggggtttcaccatgttggccaggctggtcttgaactgctgacctcaggtgatctgcccgcctcggcctcccaaagtgttggtgttacaggggtgagctaccgcacctggcccccttccttcgtcttagtcaatcctatgccacctcttcttcctccagtcccctcacctgatggtcccgacacttcatcatccaccacctcctggagggggtaccctgaggtgctccgctgggggctctgctcttcctggggctgcggttgatggctcgtcatgatctttcccaaaatctgtccaatctcaccgaagctagtctctgttctgtccttggtcttcttctggacactgctgggatccagaagagtgtgttatcaattctcgaggctgggagaagtcaggagtggagaacagctctgagaagttactgttgttcacctgaactgccaggcgccgacagagtccggtccttccaatcaggaaggtcggaatctctgatgtcataggtcattccaacctggcaaccagtttgaacaaaaacacatgtaactgccaggctgatctcttgtcctggagatcctgggtgaatggtatctcctgccactgtcccaacctcagaccactgtccaaaagcatcttcagggtctccgcatccctctgttccctgtcccagcagaggctgtgtcctctccactcaaagcttgaagcgtgttggggtctcctcttctctgtacatgcccgtttcagagtccagtctggtgggagagggatcaggatgggaaagaaaactagggtaagcagaaacgatgaaaccttataagagtgagagtatcatgtacaagagatcccaggaacattgacttgatgaaaaagtcacatcagagcactcaatttggcagagcttttctgccgaatgtttactgatattcactgtccgagattctgtactgggtgtaacgtgtcctctgccctaaggcatctttgagtccaagagatattttgaggactggaaatcatcggaaactgcccatgagctcacacatatttccaatggtgtccccagtttcagggagtccacggatcacctaaagccagcccctccagtttggctaagaaactctatatatcaagttttgtatcatatgtattgctcttaactcagaaattccaccatttatagcagtggtttatttatttatactattgaaggaaatggtttatttatgaatctatattatggatattctataagatactgggtgtacaaaaagactaagtcgaaaaatctcagctgtgcacagtggctcatgcttgcaatcccatctctttgggtggccaagggaggaagactgcctgaggccagcagttcaagaccagtgtaggcaacatagcaagaccccatctcaaacaaaacaaaacaaaacagaacaaaattagccaggtgtcgtggctggcacctgtgttccaacaacttgagagactgaggtggcaggaggattgcttgagcctaggagttaggggctgcagtgagctgtgatcgtgacaccgcactccagtctgggcaacacagcaagaccttgtgtcaaaaaaatttttttaattaaatataaaagagtttcatgacattcagagaccatccaaagaacctgtgggttccggccaggcacagtggctcacgcctgtaatcccagcgctttgggaggccatagcaggtggatcgcttgaggtcaggagtttaagagcagcctggccaacatggtgaaaccccatctcttctaaaaatacaaaaaattagtcaggcatggtggtgggtgcctgtaatcccagccactcaggaggcgggggcagcagaatggcttaaacttgggaggcggaggttgcagtgagccaaggtcgcaccattgcactccagcctgggcaacaagagcaaaactacatctcaaaaaaaaaaaaaaaacaaacaaaaagaacctgtggatgagttcccacatggcttcctaacgggctgcggctctcctaggagtctctcgctcatgggaaaggcacaaactgaatgtggaaggaaatcccattgctgtggaagtcccattgttaggaagctctgcttttctggagttcaaatttgcattcatgacgctttaaaccgtcagagctgggtgtgtcctcctacaacaaatcactttactctctctctctcctagttaacaggctttcaaatattagaacatccatgttctgacctcattaaaattgctcttttgtggaatgaaaagctctgatttaacccgtctttaagcctggtatgcatattcctctctgttccggccaccttgtctagacacactacactgaggcagtgcccatcttagatgatgttgatacattgtcaaaaaatgggcaaaccaggcgcggtggctcacacttgtaatcccagcacttttggaagccgatgccgacagataaccagaggtgaggaggttgagatcagcctggccaacatggtgaaacctgtctgtttttctgtaaaaatacagaaacaatgagctgggtgtgggagtgcacttctgtaattccagctacttgcggggctgaggcaggagaatcacttgaaccgggatggtggaggttccagtgagccgagatcacgacactacactccagcctgggcgacagagtgagactccgactcaaaaaaaaaaaaaaagtgccagacagcccaggtttggtctgatatgttcagaaaaaagcaaaacagtcacctctcaccttttcttttcctgcaatgatgccgtttaatacaacaatggctgtaggtctgcggcagaaatatcattcaagtgaaacagaagggctttcctggctggacacagtggtcactcctgcaatcccaacactttggttggctaaggtgggaggatttcttgcggccaggagttcgaggctgcagtgagctgtgatctaccactgcattccaggctgggcatcagagtgaggcctgtctctaaaaaaaacccttcactccccaaaaaaagggattttcaaataccagcctttcagcatgaggatcacatggaggaacattaagacacagatgctgggacccagccctattgattgtaattaaaaaactgaggtgaggcctgatttagctccatcattggaatccattcagatttgaaa

SEQ ID NO: 1713 - DNA, 45300 bp, Homo sapiens
tttaagtgattcttctgcctcagcctcccaagtagctgggattacaggcgcccaccaccatgcctggctaattttttgtatttttggtagagacagggtttcacgacgttggccaggctggtctcaaactcctgatctcaagtgatccacctgcctctgtgtcccaaattgctgggattacaggcatgagccaccgcaccggccatgctttcagttttcaagaaagaagacaccattattgccaaagattttggtaatttgagagatacaatgtatgttttctccatgtggatactagatagtaaggatgtgttgaatttgaagtgtctatccagaagtattttgggtacttgtttaaggattgtaaaacaatgtttccatttctggatataataaatgtatttgttaatataataaatgaatagattagacccataaactatttgcagtgttgagtcatttcccacagttaaaatcaggatgaaaatatatagctgaatacctgctttgtttcttgtaactgatttctttagtacagaacctgctaaggccatcaaacctattgatcggaagtcagtccatcagatttgctctgggccggtggtactgagtctaagcactgcggtgaagaagatagtaggaaacagtctggatgctggtgccactaatattggtaagtttgggagagttttaagccacaagaaatgatcagtgaatgttgttgtagtcaagaaacatttgttattgaaataagactatcaagtgttgatgtagtaataaactattatttttaagttaaagttagcacctattatgtgcctagtacttagctaggtagtaataataataacgacagcttttcttgtgttcttatggtgtgccaggcaggtgttatgctaagaattgcacagaaatatctcatttaatttgcagaatagctgggcgtggtgtctgacgcctgtaatcctagccctttgagaggctgaggtggggggattgcttgaagccaagagttcaagaccaacctggccaacatggggagacctcgtctctattaaaaaataaagcaggccgggtgtggtggctcacgcctgtaatcccagcactttgggaggccaaggcgggtggatacctgaggtcaggaattcgagaccagcctgtccaaaatggtgaaactctgtctctactaaaaatacaaaaattagccagacctggtggcagaagcctgtaatcccagctactggggaggctcaggaatgagaattgtttaaatttgggaggtggaggttgcagtgaaccgagattgtgccactgcacgccagcctggggacagagcaagactctgtctcaaaaaaataaaataaaataaaataaaataaatcctggagtagtggctcacatctgtaatcccagcactttgggaggctgaggggggctgatgctttgaggtcaggagttcaagaccagcctaaccaacgtggtaaaaccctgtctctactaaaaatacaaaaattagccagatgtgatggtgcatggctgtaatctcagctcctcagaaggctgagggaggagaattgcttaaacctgggaggtggaggttgcagtgagccaagatcgattgtgccactgcattccagcctgggtgacaagagcaaaagtccatctcaaaaaattaaaaaaaaaaaaaaaaaagggaagaaaaaaaagaaaatgacaaaattaaaaaaaaattattaatctgccaaataactttatgagatagaacttattacctccattttacagttgaggaaattaagggacagtaaatttcctttttttgagattataaagctaataaaatagaatctaggaagtctgattccagaaccagttctgtttttttttcttttttttttttttgagatagagttttgctcttgttgccgaggctgcggtgcaatggcacgatctcaactcactgcaacctccacctcccaggttcaagcgattctcctgcctcagcctcacaagtagctgggattacaggcatgcaccaccacgcctggctaattttgtatttttagtagagatagagtttctctacgttggtcaggctggtctcgaactactgacctcaggtgatccgctcgctttggtctcccaaagtgctgggattacaggcatgaaccactgcgcccggcccccgttctccttactgggtatgttaaaattatttctttcaaaggaaaaggctggtcaaagtgcaacggtctttacaactaattgatcacaaccagttacagatttttttgttccttctccactccaactgcttcacttgactagtgtaaggaaaaaaaaaagaggaaagaaagaaaatgctaaactatttaatctgggctagtaaatggccagaaagaactttataaaaatgaaatatacaaaatgacactagtatgtttaactaaaggtatagttacgacacttaaatttgcacgttataaataatatcaatataaaaactgatagcgtgggtccatttttaataaatatataaatattttaaactttctagatctaaagcttaaggactatggaatggatctcattgaagtttcaggcaatggatgtggggtagaagaagaaaacttcgaaggcttaagtaagttaactttctaatcctattacaaaataattgggccacatgtcttagaattttgagtaacactgtcttgggaaacacaaaaacagttttttaaagccagttactagatatcatgtatatttgttgttatagcacttgagatatcttagtccttactttacagtctctttcagctctgaaacatcacacatctaagattcgagagtttgccgacctaactcgggttgaaacttttggctttcaggggaaagctctgagctcactttgtgcactgaggtgagaaaatatttttatccattcacttgaccccttagaaaaacctctctgaaaattaattggaatcattattatttacaattttctatctcaatatctcagcttctagcttctgaattctgttttgtctcactgccaatctaagtcctagtacttctgaaatgtgagcaataaatgaatgaaatgaagcaaatagtattctttaaaaaattggttacccttattaaaacagtaacttctcaatttgaacataacatatagataataaatgatagttaccattggttttcattatcaatttttagggaaacatttcaccaaagcactatttaattacagcacagatactaaatttttataaataattacatgcacacacacatatatagacatatatatacatatatatacatatatatacatatatatacatatatacatatatatacatatatacatatatatacatatatacatatatacatatatatatacacatatatacatatatacatatatatacatatatacatatatatacatatatatacatatatatatacatatatatacatatatatacatatatatatacatatatatgtatatatatatatatatattttttttttagacagagtcgcactctgtcacccaggctggagtgcagtggcacagtctcagctcactgcagtctctgcctcccaggttcaagtgactttcgtgactcagcctcctgaagagctgggactatagcgtgcaccaccactcctggctaatttttgtatttttagtagagatggggttttgccatgttgcccaggctggtctggaactccaggcctcaagtgatctgccctccttggcctcccaaagtgctggaattacaggcacgagccaccgcaccctgccctacatatacattttaattataatatcttttggattctttaaaaaaaattttaaaaattttaaaaaattctttaaaaaaattcttttaaaaaattttgtttgaagagtaataacaaaacaaatctctatttgagaatcaataaatcttgagatcatttatggttttgcaattcaacctgaaaaatgaagtcaaagcttttatcaaaacaaagcatgtttagtgctctctgtctcactgtcttttagatgccagaccttagattttgtgatgactcctcaaccgtttagatctcggttatctcagagggatcatcagctttttaagaaaattttgagagaaaagcaagtgaagaaaagagtagtcagtgcccaacatcatggatctctcactgaacacaccatgcctggtattctctcacagtgatgtcaccatttctacctgccacgtatcggcgaaggttgggactcgactggtgtttgatcacgatgggaaaatcatccagaaaaccccctacccccaccccagagggaccacagtcagcgtgaagcagttattttctacgctacctgtgcgccataaggaatttcaaaggaatattaagaaggtacagtaaattaatcctggttttcaagagtattggttaatgcacatgagcaaaagatttactaaagatgtttattcttcagttgattctcttcccataatttattgagaaatgctttatttgcatttctcattaaagacttaacttcaggatgatttacttttttctttttatcacataatgtttattaggactgggaaacatagtgagactctgtctctatgaaaaattaaaaaaaaaattgactgggcatggtggcatgcacctgtagttccagctacttgggaggctgaagtgggaggatcacctgagcccaggaacttgagactgcagtgagctatgattgcgtcactacacttcagactgtgagacagagtaagaccctgtctggaaaaatatatatacatatatatacattttttttattttttatttttatctttttttgagatggagtctcactttggcgccctggctgcagtgcagtggcgcgatctcagttcactgcaacctccacctgccaagttcaagcgattctcctgcttcagccttctgagtagctaccattacaggcgcgcgccaccacgcccggctaatttttgtattttcagtggagacggggttccaccatgttgtccaggctggccaggctggtcttgaattcctgccctcaggtgatccgcccacctcggcctctcaaagtgctgggattacaggcgtgagccaccatgcctgaccttatgtacttatatttttatgagaatatttctcttggttttctgataaatgagttactggaacccttatgaatttgaatgcaaatgaaacagctaaatgttatataattgttgtgtttaaaaagcagattataaaactgtctgtattatatgattacagttttataaaaacaaaacaggcctaaatgtgtatagtataaagactgaagagtcagcacttccatgttctcagcggttatccttggatgtgagatctcatgcactttttgctctcttctttgtgcctttccattttgcatgcgtatttcttataatctaaaaagttacttaaacatatgcagctaaaaactttttttacttgtaaagcgtttggtgctaattttaacttttttttttagacggagtcttctcactctgtcgcccaggctggagtgcagtggtgtgatcttggctcactgcaacctccgcctcctgggttcaagtgattctcctacctcagcctcccaagtagctgggattataggtgtgtgtcaccacacccagctaatttttgtatttttagtagagatggggtttcaccatgttggccaggctggtcttgcacccctgacctcaagtgatctgcccacctcagcctcccaaagtgctgggattacaggcgtgagccaccacgcctggcttttttttttaaagcttttttgtaagtcagccagcaagaacacaggaggaagtactcaaatctcccttacacagctgggggctgtgtcaggttttataagcatagggtaatgaggtgtgatttgattggatcttgcaataaagtaatgctgggaggtgtgatctgactggatcctgccatggggtgacaccaaaactcaatctgattggatcctggctcctgcctgggggtgtctggttcttaaatcggtccgagctcttcaggctgagctcttaggttccactccacggtggcacgcgtggttaacctgggcatgcacagggtacatgaccttcaacctgcaggtcgatggcaattggaaaacaactgacaacttcattacataaaagttgaactgattcgggtgcggtgactcacgcctgtaatcccagcactttgggaggccaaggcaggtggatcacctgaggtcgaggagttcaagaccagcctggccaaaatggtgaaaccccgtctctactaaaaatataaatattagccaggcgtggtggcgcacccttgtaatcccagctaccccagaggctgaggcagcagaatgcttgaacctaggacgtggaggttgtggtgagctgagatcgtgccattgcactccagcctgggtgacaagagtgaaactccatcaaaaaaaaaaaaagttgaactagatttggtctgatgcagttacagatttacaaaccgcgtcccaccctcctgccaacaccttccactcctcattcttgagggattagggatggaggtcatgcttctgtatcgacttcatgctgaccaggggcacttagtcccctaaagtgagaggaatgaaactcttgggcttctgagttcagatgagttctggggtcacccggagtagcttgaaaggctggtattgttgtaatacaagctgaaggtggaagtgttggatcctggaggacaaacagctcaccatccatttaaataaataggaccaaaaagtaacagaacagtggccacgaggggccccaacagaggaagaaaccaggtgaggtgtggtatagtggactcgactgccttctaaatctcagtggttgtccgggtgcggtggctcacgcctgtaattccagcaaaagaagagccgaggcagggtgatcacgaggtcaggagttcaagaccagccgggcaaacatggtgaaaccccgtctctactgaaaatacaaaaattagccaggtgtggtggcgtgtgctgtagtcccagctactagggaggctgaggcaggagaattgcttgaacctgggaggcggaggttgcagtgagccgagattgtgccactgcactccagcctaggtaacagagcaggaccccatctcagtcaatcaatcaatctcagtggttgaactacccttgatatggttcagctctgtatccccaaccaaatctcatgtccaattgcaattcccagtgttgagggagggacctggtgggagatgattggctcatggcggctgacgtcccccttgctggtctcgtgatagtgagtgagcgctcatgggatctggttgtttagaagcatgcagcacctcctgcttcactctctctgtctctcctgctccaccatggccagaaacgtgcctgcttccccttcgccttctgccgtgattgtcagtttcttgagggctccccagccatgcttcctgtacagcctgcaaaactgtgagtcaattaaacctcttttcttcataaattccccagtttccagtagttctttatagcagtgtgaaaacagactaatggacccttctggttgaaggaatgtagccattctgcttgtttaagtatttcctttctattcatctctatttcccgggaggtgtttatccaagtgcaataggagatattggtgactgcagagtcccctcagtgttctgctagtaaatagttgaaggttgatcagtgatctccagcattttcagtctggcatggaaaagcccccatgtaactggtaaaggtatcagtaagcaccaggaggtatctaaatccaccaggagccataggcatcatgttgatgtccatttaccagtcttccctggcaagattctctgaattgtactgccttggccaaaagaggtatgggaggggctgggcacagtggctcacgcctgtaatcccagcattttgggagaccaattcgggtagatcattagaggtcaggggttcaagaccatcctggccaacatggtgacattccatctctactaaaaatacaaaaagtcagcggggtttggtgttgggtgcctgtaatcccagctactcgggaggctgaggcaggataatcacttgaacctgggaggaggaggaggtggcagtgagctgagatctcgccattgcactccagcctgggcaacaagagcgaaacttcatctcaaaaaataaaacaagaagtctgggtgtggtggctcgtgcctgtaatcccaggactttgggaggccaagatgggtggatcatgaggtcaggagttcaagaccagcctggcctagatggtgaaaccctgtctcgagtgaaaatacaaatattagctgggcatggtggcacacacctgtaatctcagctactcagaagtctgagacagaagaattgccaaaacccgggagggagaggttgcagtgagccgagatcgcgccactgcactctagcctgggcgacagagcaagactccgtctcgaaagaaagaaagagaaaggaaattccccagggaagtacctcggcttatttcatgaagaggtactgaaggaagcagaggcatgtggaggacttccccacctcgtgcagctatttgggccgtggcgtctgaaatttcttatttcagagtcacccctttgatgaccttggcagtggactgcagtcatctgtttaggcctctccatggcccgtgtcaatgccgatatttctgtctgttgcacatttgatttccttgttgttggcatttagaaggccccctgtttcccagatcacaccacgggcatggaccgcagagattgcatcttgtgagtctgtagaaacagtcaaggccttgtcctctcttaggtccagagctcaggtgaatgcagattttcccggccatctgtgctgaagtccctgtggggaggctcctggctggtttcctgtaggtagacagctacacatcctgcccttcattggcttcttttcatgaagctcctgctgtctacaaaacatgtctcccttttcttcttgaaccacatctctgttattgaaactctagaagtcagccaggcacagtggctatgcctgtaatcccagcactttgggaggccaaggtgggtggatcacctgaggtcaggagttcaagaccagcctggccaacatggcgaaaccctgtctctaatacaaatactaaaattagccaagcatggtggccactgcactccagcctgggtgacagagcaagactctgtctcaaataaagaaagagaaagtatcatgcttttcagagttctgtgggttgttatggtgaattatcaaacctgaggacgtggtgggaacctccaaatttgcagccagttggtgagaagtacatgcggtctgtggacacccaagcttgcagctgcatctgaagcgagggcagcctagcgggggctggtggccttaacctgtggcatttgatgtaacatcagggagttgacatcagaattacgtcacacaggccaggtgcagtggctcatgcttataatcccagcaattagaaaggcaagataagaagattgcttgagcttgagtctgagcccacagtgagctatgaccgcaccactgcaccccagtctgggtgacagcacaagaccccgactccaaaaataaaaaagaaaaatcacaaagaattgcatggcagagtgcctgtctttcacagcttgaactgttgcaggaactttctttttttttttttcttttgtgatggagtctcgcgctttcacccaggctggagtgcagtggcgcgatctctgctcactgcaggctccgcctcctgggttcacaccattctcctgcctcagcctccggagtagctgggactacaggcgcctgccaccgcgcccagctaattttttgtatttttagcagagatggggtttcaccgtattagccaggatggtcttgatctcctgacctcatgatccacccacctcagcctcccaaagtgctgggattacagtcctgagccaccgcgcctggacttttttttttttttttgagaggggttggggagacatattctctgctagtgattctcctgcctggtctcgaactcctgctgggatcacaggcgtgagccaccacgcccagccacctttagagttttcttaccacctggttttcctctctcaatatctttctctcatttcctgctttaaaactctagcttggggtctgggcacagtagctcatgcctataatcccagcactttgggagactgaggcgggtggatcacttgaggtcaggagtttgagaccagcctggccaacatggtgaaaccttgtctctactatttttacaaaagttagtcagacgtacaggcggatgcctgtagtcccagctacttgggaggctgaggcaggagaatttgcttgaacgccgaggtgaaagttgcagggagccgaggttgtgccactgcactccagcctgggagacagagcgagactgtctccaaaacaaacaaacaaacaaacaaacaaaaaaaccctgtagcttgggatcagccttctcttctgttgtttttctttaaaaaataaaaattaaaaataggcttcaagtgatcctcccgccatgacctccaaaactgctgggattgtaggtgtgagcactgcacccagccgtatgtttttttctacataaaaaacagcacaggattatcttccaaagctaacaaatatgttcaaataaccacaaccccattaaggaaaaatgtcacttgacagcaaataatcaatccagaccacaatatgatcacactcactgtgaaggtgagaaaagttcatctttattatgtttccccaagagatgcactgcactgttctcttgaaaacacacagctcatgtcctcctttagaacacacatcctctttaaagtaacatacaaacatgccaaaacaagataaaaaattccatctgaattctcacatttcaaacatacactaaatatcaaataaaaatttatttttacaagaatttaggggaactaccacatagctataaatgtaatatatatgttaactaagtatcatagataaaaaccatgctcccttcagcagcacgtgtaataatagatacaaagattgaaaggtaaaagatttaggatgaaaagaatcctctcttaaaaaggaaaacaaaattatatgtatgtgtatacaacagttataatacccatcacacagctttatagaaacagcatctattcaaaaataccagtatttccaaaatatttaaaataatatttaaagtaataataatatttaaataaataaatatatttaataaatatttcagtaaataaaataatatttaaataattctatacccatgtttttcaaaataaaccaataaaatagatagtatatattagacgtgttagtatatatatctgagacatgttaaaaatcacaactgaattctcacaagtcagtcacaaacctaaacagcaaataaaaatttctatcaccagaattatgtttttttctggtggggaactaccaatagctataaatagaagagattattatggaagtatcatagataaaaagagtgctcgcttcaggagcacatataataatacagaaaaaaatttaaagataataaaagatttaggataaaaagaattctcacttaaaaatgaaaagaaaattatctttaggtatatataacaactataactctcatcaaaaaactctacaggaacagcatgttttcaaaagtacaacaatttccaaactatttgaaataaacctattaataattcaatggccaacattttccaaacaaaccaataaaatgcatagtgtgcatgaagctatctgttacagtctgtggcactcatatttcacaaagaattctgtgccaatctgagcccctgcactgtgccttcaaatgctcctggactgtggcaaccaagtccataagaaacaggacctccaggttccgccccagggaggttggcattcagcaatataaaaagggaggtggtgccgcaggaaagggtggaactggaaacactcctggtttcttacttttctccaaggactcctagaagtaccccaccccacccctgctccttggaggacaacgtgatcactgtattcagctctgtcaagaatggtccaggttcttctagatgatctgcaccaatggttcctctcctccttcctgatgtctgccattagcattggaataaagttcctgctgaaaatccacatctcccctgggtccggtgttctggaagtgagagagacaatgtcacacttcaaggaggcagctctctagacaggaaggttattcacgtcccatgtcaagtctagctagagttcagagcaattgagaagtgcaattttatctcctgcctttcattctataccctgcttctgaaccatcgtgttcaactgtgaaactcacactttggtgaccctgactccaaaacttaatacacccaaggtcagccccagtgatctgcttcatagccaggactttgggtgggtcttcccagggagtagggcaccctcagagaatgtggctttggacttcatcacagctggggccttttgtgtcacttcagatctaaacttgtaaccgtgctagatctgtttctaacgtgacagcatcacgaaccacgagtccagaagcctaatccataatcctccctcctcatgacgaagtctcatgctctgtgctcaacatggttagctgcacaagatgtaaaccaaagcttcactgaaccctcgacccaaatcggtaactcaagtgcatcaatcataatgaacctccccgaactcagtatttatgattatttttgaggcagggtctcactctgtcgcccgggctggagtgcagtggcaggatcagggctccctgcagccccgacctcccaggctccagcgatcctcccgcctcagcctcctgagtagttgggagtagagatgcctcccacatcgcctggctaatttttgtatttttgtggagaggggatctcgccacgttgcccaggcttgaagccagatcaagcaattgggttccttggatttccgaaatagaccccaatattctgcctttaccccggaggatgcagatgtaccttctctcaggccgatgacctcaggcctccacggtccctggagctctaggaaaggtgggcgcgatctcgcgcccacacccagtgctctgggtcataagcctggatctggaaaaacaaacgcgctttgagaagacggggactccccaggatacccctctctcccctcgtccagcctccagcccacccgattcctccccacatcctccacgtccccaggccccacccacctcttccaactcctccagggaaacccaagccctgcagcgcatggaacaaaagaagtggaaccgatacttccggaacaaggctatctgagagcagttcttcctggccctcgggttcatgtaacggcataactggaaccaaagctcactgagcaagggtatatgagagcgggtctcctcgtacaggaagtagaagatgttttgtttgggggcctcgtcgtcctcctccatgtcattggccagatagctgaggacagaaatcaggttgctgctcaggggcaccaccaggagagacctccggctgaggtcagcttctcagagaggaaggtaagggaccgtccctagctcaggactggcacccaccctgcagagagccacgccttcctcaggagggctctgctggacagagacctgatcaagggcgtctcccactccttcaggatggagacaaaaacccaactggtgaccaagagtggtggcttatgcctggaatcccagcacactgggaggccgaagcaggaggatcacttgaggccaggagtttgagacaggcctgggcaacatagcaagaccctcgtctctattaaaaatataaaaaatacgccagacgtggtggctcatgcctgtaatcccagcgctttggaaggctgaagcaggtggattgcttgagaccaggagtttgagaccagcctggtcaacacagagaaaccccatctatactaaaaatacaaaaatcagcctggtgcggtggcacacccattagtcctagctactcaggaggctgaagcataagaattgtgtgaacccaggaggcggaggttgcagtgagccaagattgggcccctccattccagcctgagagacacagcaacactcttgtcttgataaataaataaataaataaataactgtccaggtgtggtggtacagccctgtagtcggagctaatcaagaggctgaggtgggaggatcgcttgagcccaggatatggaggctgcggtgagctatgatctcaccactgcactccagcttaggggacagggcaagtctgtctcaaaaaaaaaaaaaaagcaattgaatacactgatattttgccaggaccctgccttctacaggcatctagtctaatgggactgggagtaatcaggggagatgacctaatcccaatgtcacattataataggatgtaactggagagctacgggcatgcagaagttggaagacgagggaaggcatcacagaggctgtggggtgaaccgacttcaaggaatgggtccttcccttcagaaccacatgtgtgcgggacacccagacagaaaacacaaatgcaaagtcaagtggagggcatttggaaggagcagtgaagccaagccaggaaacaccaagatggcgagccagtgtggttgtagagattgtagagagggtggaattggcactgtggaccctggcctcgatagagaaagacatcagctaaggaagttgttcaggtgggcagtgaggttgtcgtgctttggaaagatgttcaggctgcactaggaagccccctggcttggggagagactccaggaaaccccagcagggagcatttgacagtggattcgagtgatgcaagggggacctggactgtgacctctgtcacgggaacccggaggaggctgatggcttttgcggttgatgtgggaaggagagagaacaaccggaaacgtctgcttgctgggggaagtgtcatgtccgctcctccgctccttttcttctccccttaggagcggttcatggttccttttgttttttgttctttttttttttttttttttttgagactataatcctgtcttttttgtacacagagtaaagaggacaaataggtgaaagaataaatgaaaggctggaatcccacttcccccgctgtcccagggcattggatattgacggataggaggcagcaaaccactcacagagccaggaagaaatgaatgcgttggtattgccaggaggggaggccggcccggctgaaatacgctatgaccatagccaggagatactgatggagagaaaggaacacagagagggagaggtcacatcttgggagaggaagattgtggatatagtggaatgggggtctggggaggggttgcccatcagagaagggacctcagtgttggggtgactgtgctcatgtggaaattgcggggtggaggggtattcgaaggtcggatgcaaatccgagaagccggaggaagggtttttggtgatgctcccaggatggtgggctccgatgggatctttggagggggtgtgtctaggtcggctggtgtcaggagggtcttttgtgtgccaggcagagaactgtcccaaggagctgagagtagagggcccaggagcttcagggctgcagccagactgtggcccagggctcagatcccaaaggacccataggagaggcaggggccactcattcactctgcaagagaccagcagaatcctgacggagatgctgacaaatcataaaaagacaaagaatagccgggagtggcagctcaagcctgtgatcccagtactttttgagaggtggagacaggaggatcatgtgagcccaacagttggagaacaacctgggcaacacagcgagaccctgtttctaagaagatttcaaaaattagttgagcatggtagcatgtgcctagtcccagctcctcaggaggctaaggaaagaggattgcttgagcccaggaattagagtgagctatgatcatgccactgtactccatcctggggagcagagctggactctgtctcagaaaaaaaaatgtgtgggtgccaagactcaagaccatgggagctggtcagacacagtgctgacgtctgtaatctcagcactttgggaggccaaggcgggtggatcacctgaggtcaggtgttcgggaccaatctggccaacatggcaaaaccccgtctctactaaaaacacaaaaattagccaggcgtggtggttcatgtttgtaatcccagctgcttggaggctgaggtgggagaatcgcttgaacccaggaggcatcagctgcagtgagtcaagatcgagacactgccctccagcctgggcagcagagcaagactgtgtctcacaaaaaaaaacaaaaacaaaaacaaaaaaaaactgtaggagcatctggtgggaggtggtggacggagaactgtgggtttggaagctgcgccctccccctggccgtgcgttagaacaggaacacagttacatagagaacaaccttaccttgtccgacaccctcagatctttgtcccaggccaggagtcttttaatgacaggatcctctgtgattagagagcagatgtcagtgtgagaagcaggacagggtttccgtgagagcagcagggcagcgaggagaagtgtgcctcccgggggaaagtctcaggattgtggccgcgggtgaggtggatgagagaggggagaatgactttcactgggcaagggagagaggctcctgctctgagactcccctgagaagaggccgaaggaggccctgggtgtgagaatctacaggatgtagagctgggaatcagccaggaccccctccagcagacacggagggaccactgcagagtcataaaggaattcccatcatttcctcatgagacagtcacacatcagggtgtgaccatggccttgggatccctcactatggatggagacacttaggtttagaaaagtcagtaagaaacattaagtttcagagggcacagctgaaaccacttttttgatttttgattttgtttttctttatttgatttttatttttatttatttattaatttattttgagacagagtcttgctctgtgggccaggctggaatgcattggcctgatcttggctcactgcaacctctgcctcctgggtttaagcagttctcctgtctcagcctcccgagtagctggaactacagggatgagctactgtgcccagccttggtttttcttttgacgcagagttttgctctgtcacccaggctggagtgcagtggtgcagtcatagctcactgcagcctcaaagtcctgagttcaagcaatcctcttgcctcagcctcccaacgtgctgggatctcaggcgggagccacagcgcctggcccaaaaccaagctttcttatcccaagcaccgacctttatcaagtctacctaatcctctgttgtctccttaagtgtccctcatgagtgatcacttcagagtcctcccgcatggagagctcacccactggggcatatttttcccattggaaaagtgtggttattggaagtttcctctttagaaagaacaggattggaggtgctctctggggtgtcctcctaccaagcagcctgttgaaggcctcgtagtactcagggagcacgagcgacactcgccgtcgcttcgccttcatcttgaggccacacagcgtctccgccacccaggtctcctcaggctcaggggcgagctccttctctggctcatcatcagattcatccaaacattccctcttccttttccagccaagggacctacgtggggggctgggatctaccccaggggctgagtaaagaaaccaggccaccgtgtaatgcttctgcaactgatcacgttagaccccgaccccaaaccccaaaccactctccatcctccccagcctcgcagactgctggcttctccaagccacctttctgactttctcctctgctcaaccccatgtgccactccttcccctccccattcttccctctctctgtcctcagaacactgcctcatatccttccctggtccctggctctctgagtccctcttttttttttttttttttgtttcgagacagaatcttgctttgtcacccaggctggagtgtagtggtgcaatctcagctcactgcaacatgcatctcccggattccagttattctcctgcctcagcctctcaggtagctgggattacaggtgcctgccataatgcccagctccattttgtacttttaatagagacagggtttcaccatgttggccaggctggtttcaaactcctggcctcaagtgatccgcctgccttggcttcccaaagtgctgggattacaagtgtgagccactgcacccagcctgaatttttccattctttccaaacaccctccccaggttttccttcctgacctctgacccctcttttttttcttcttttttttttttttttttttttttttttttttttttttgagatagcatctcactctgtcacccagactggagtgcagtagcacgatctcggctcactgcaacctcttcctcccaggctcaagtgattctcctgttttagcctcccaagtagctgggattataggcacacaccactaccgcctggctaatttttgtacttttagtagagatggggtttcaccatgttggccaggctggtcttgaactactgacctcaggtgatctgcccgcctcagcctcccaaagtgttggggttacaggggtgagccaccacgcctggcccccttccttcatcttagtcaatcctatgccacctcttcttcctccagtcccctcacctgatggtcccgacacttcatcatccaccacctcctggagggggtaccctgaggtgctccgctgggggctccgctcttcctgcggctgcggttgatggctcatcatgatctttcccaaaatctgtcccatctcaccaaacctagtctctgttctgtccttggtcttcttctggacactgctgggatccagaagagtgtgttatcaattctcgaggctgggagaagtcaggagtggagaacagctctgagaagttactgttgtccaactgaactcccaggtgccgacagagtccggtccctccaatcaggaaggtcggaatctctgatgtcatcgctcatgccaacctggcaaccagtttgaaaaaaaacacatgtaactgccaggctgatctcttgtcctggagatcctgggtgaatggtatctcctgccactgtcccaacctcagaccactgtccaaaagcatcttcagggtctccgcatccctctgttccctgtcccagcagaggctgtgtcctctccactcaaagcttgaagcgtgttggggtctcctcttctctgtacatgcccgtttcagagtccagtctggtgggagagggatcaggatgggaaagaaaagtagggtaagcagaaacgatgaaaccttacaagagtgagattatcatgtacaagagatcccaggaacattgacttgatgaaaaagtcacatcagagcactcaatttggcagaggttttctgccgagtgtctactgacattcactgtccgagattctgtactgggggtacacgcgtcctctgccctaaggcatctttgagtccaagagatattttgaggactggaaatcataggaaactgcccatgagttcacacatatttccaatggtgtccccaatttcagggagtccacggatcacctaaagccagcccctccagtttggctaagaaactctatatatcaagttttgtatcatatgtattgctcttaactcagaaaattccaccatttatagcagtggtttatttatttataccattgaaggaaatggtttatttatgaatctatattatggatattctataagatactgggtgtacaaaaagactaagtcgaaaaatctcagctgtgcacagtggctcatgcttgtaatcccatctctttgggtggccaagggaggaagactgcctgaggccagcagttcaagaccagtataggcaacatagcaagagcccatctctaaaacaaaacaaaacaaaacaaaacaaaattagccaggtgtcgtggctggcacctgtgttccaacaacttgagagactgaggtggcaggaggattgcttgagcctaggagttaggggctgcagtgagctgtgatcgtgacaccgcactccagtctgggcaacacagcaagaccttgtgtcaaaaaaatttttttaattaaatataaaagagtttcatgacattcagagaccatccaaagaacctgtgggttccggccaggcacagtggctcacgcctgtaatcccagcgctttgggaggccatagcaggtggatcgcttgaggtcaggagtttaagagcagcctggccaacatggtgaaaccccatctcttctaaaaatacaaaaaattagtcaggcatggtggtgggtgcctgtaatcccagccactcaggaggcggggacagcagaatggcttaaacttgggaggcggaggttgcagtgagccaaggtcacaccattgcactccagcctgggcaacaagagcaaaactacatctcaaaaaaaaacaacaaaaaaaaaaaacaaaaagaacctgtggatgagttcccacatggcttcctaacgggctgcggctctcctaggagtctctcgctcatgggaaaggcacaaactgaatgcggaaggaaatcccattgctgtggaagtcccattgttaggaagctctgcttttctggagttcaaatttgcattcatgacgctttaaaccgtcagagctgggtgtgtcctcctacaacaaatcactttactctctctcctagttaacaggctttcaaatattagaacatccatgttctgacctcattaaaattgctcttttgtggaatgaaaagctctgatttaacccgtctttaagcctggtatgcatattcctctctgttccggccaccttgtctagacacactacactgaggcagtgcccatcttagatgatgttgatacattgtcaaaaaatgggcaaaccaggtgcggcggctcacacttgtaatcccagcacttttggaagctgatgccgacagataaccagaggtgaggaggttgagatcagcctggccaacatggtgaaacctgtctgtttttctgtaaaaatacagaaacaatgagctgggcgtgggagtgcacttctgtaatcccagctacttgtggggctgaggcaggagaatcacttgaaccgggaaggtggaggttccagtgagccgagatcacgacactacactccagcctgggcgacagagtgagactccgactcaaaaaaaaaaaaaaaaaaagtgccagacagcccaggtttggtctgatatgttcagaaaaaagcaaaacagtcacctctcaccttttcttttcctgcaatgatgccgtttaatacaacaagggctgtaggtctgcggcagaaatatcattcaagtgaaacagaagggctttcctggctggacacagtggtcactcctgcaatcccaacactttggttggctaaggtgggaggatttcttgcggccaggagttcgaggctgcagtgagctgtgatccaccactgcattccaggctgggcatcagagtgaggcctgtctctaaaaaaacccttcactccccaaaaaaagggattttcaaataccagcctttcagcatgaggatcacatggaggaacattaagacacagatgctgggacccagccctattgattgtaattaaaaaactgaggtgaggcctgatttagctccatcattggaatccattcagatttgaaattctctgagttggacagtgcaagagagatcctaaagaaagcaaagtcactgtggactgaaatgagctggcaaggttttctgagcgtggtgaaatatgatctgggcctcgcttgggagggctgtggccaggccttgagtccgtggctcagtgggaccttctgaaacagcctccaatccgtgcccccacttcatttgctagtggatgaccccctccagcggctttggtgctgatgggaataagtcaacctgcagcggaagttcagcccaagtttcagcccagcagcttctacacacctgtccgtggtctggtcatgctgccatctctgcggttctctgcggttctctgcggagtcgtggtttctgtaccttgaagagaacttcccctctgggacccagaaacccagtgaatcctcaggaaaaaagggaatgaaattactgaagacaactctgtggcggggagatggaaaagaggctctctctctttttttttcctaatattttgagacagagtttcgctcttgtcacccaggctgcagtgcagtggctccatctcggctcactgcaacctctgcctcccaggttcaagcgattctcctgcctcagcctcccgagtagctgagattacaggcacccaccaccactcccggctaatttttgtattttagggtttcgtcatgtttgccaggctggtcttgaacacctgacttcaaatgatccacccgcctctgcctctcaaagtgctgggaatacaggcataagacactgcacccggcctgtttttgttttttagagacaaggtctctgttgccttggctggggtgcagtggtacaatcagctctctgttgcctcggctggggtgcagtggtacaatcagctctctgttgcctcctgggctcaagcaatcctcttctctcagcctcccaagtagctgagactacaggtgcatgcctgtagtagatatagcatcttgctctgttgcccagactggtcttgaactcttggtcacaagcgatcctcttgccttggcctctcaaagtgctggaattacacgcgtgagccattgagcccaaccagataagatgatctttaagggcccttcccatggcaccataatccaagtcagcgagactgtggctatagcaagtttaacataaccagatacgctagtattatgggctgcatggtgtgccccccacccctaattcatgtattgaagccatgaccctccagaccttagaggtgaccttattggaaccagagtctttacagaggtgatcaagttaaaatgaagtcactagaggccaggcactgtggctcacacctgtaatcccagcacttcgggaggccgaggcaggcagataatgagcccaagagaccgagaccatgatgtccaacatggtgaaaccctgtctctactaaaaatacaaaaattagccaggcgtggtggtgtgggcctgtagtcccagctactcaggaggctgaggcaagagaatcgcttgaacccggaaggcagagattgcagtcagccaagatcatgccactacactccagcctgggtgacagagtgagactctatctcaaaaaaataaaaattaaaaaactaaaaacctacagtaccgccttttacataatgcaatggtttggtaagcacatgcaccccagggaggtagtggcagattcagtcaaccttcccagcagcgtggagacgcagtcaggcatagcaggtgttgatgtggtttgaacccacagcttggctcaaatccacactcccctacttagtaccgagtgaagccacttaccctctaagtgccttacttttcttttcttttcttttttcttttttcgagacagagtctcgctctgtcacccaggctggagtgcagtggcatgatcttggctcactgcaaacttcgccttccaggttcaagcaattctcctgcctcagcctcccaagtagctgggattacaggcgcccaccaccatgccgggctaatatttgtatttttgatagagatggggtttcaccatattgcccaggctggtctcgaactcctgacctcaagtgatctgtctgcctcggcctcccaaagtactaggattagaggcatgagccaccacacctggccacttttcttatctatatttgttatgtggatgacttgtgttaacgcaaataagatgctgctcgtcatctttaaagaaaataggtggcaacctgttatagcaagtcctgtttttatttgtacttatgaggctttaattaaacgctaagaattaaaatgcacataataatagactttacctcacaaactggcttcaaatattcgatgagacttacatgtattacttaaatgaggttaaatttaaccttttaaaaatgatttattgtggctgggcacagtggctcacacctgtaatcccagcactttgggaggccaaggcagacggatcacttgaggccaggagttgaagaccagcctgaccaacacggcaaaaccccatctccgctaaaaatacaaaaattagccaggcatggtggtgcacacctgtaatcctagctactcaggaggctgagacacaagaatcgcttgaacccgggaggcagaggttgcaaggaggtgagatcacaccactgcactccagcctgggcaatagagtgaggctctgccttaaaacaaagaaaaatgattttgggggatgatggggtgtcactgtgttgaccaggcttgtctcaaactccttgcctcaagcaatccacccacctcagcctcccaagtagctggaactacaggcgcatgccaccacgcctggctaatgtgtgtgtgtgtgtgtgtgtgtgtgtgtgtgtagaaacaaggtcttactgtgttgtttaagctgctctcaaactcctgggctcaagtgatcctcccacctcggcctcccaaagcattggaattacaggtgtgagccacctcactgagccctccacctttcagctgaacgcagaaaagtacaatcttttaacccaaagcgttcctcacacttagggtcaggaagagcccttcatgccctggaggcaactactaaccctctgctaaacactctgactctgggtgtgagaaacacacctactgtgccccacatatttttccaaatacaacttaatttagccttcacgacaaccctggagtgaaggatcattaactttatttcatagatgtggaaactgagactcagaggcaggaaatgacctccttctggaggctgcaaattctttgatgctcctttgatcaacaggtgggagctggccagaggtggtggctcacacctataatcccagcactttgggaggccaaggtgggaggattgactgaggccaggagtttgaaactagcctgggcaacatagcaagacctcatctctacaaaaaatacacaaattagcagggtgtggtggtgcacacctgtagtcgcagccactcgggaggctgaagtggtagcattgcttgagcccaggaggttgaggctggagtgagccatgatcaagccactgcactccagccgaggagatggagatagaccctgtctcaaacaacaacaaaaaaataggtgaggatcagccaggcatggtggctcacgcctgtaatcctagaactttgggaggccaaggtgggaggattgcttgaggccaggacttcaagaccagcctgggcagcctagcaagatcccatcccttaaaaaaaagtttttaggctgggcatggtcactcatgcctgtaatcctagcactttgggaggccaaggcaggcgggttgcctgagctgaggagtttgagaccagcctgggcaacatggtgaaatcctgtctctactaaaatacaaaaaattagccaggtgtggtgttgggcacctgtaatcccaggtactcaggaggctgaggcaggagaattgcttgaacccaggaggcagaggttgcagtgagccgagagcgcaccactccactccagcctggacaacagagcgagactccgtctcaacaaaaaaatgtttttaattagccagctgtgatgatgcatgcccatgtcccagctacttgggaggctgaagcaggaggattgcttgagcctgggaggtcaaggctgcagtgagctatgattgcgcccctgcactccagcctggacagcggagggagaccctgtctgaaaataaaaaaagaggtgggggcctatgaccccccctttaattttggcccaaccttagtaacaggatagtcattgagtagggcaaaagtgatgttatgatgtttttcagcctccaatttacagtctaaaacatgtcttgggtaaacacagcaagactccatctcaaaaaaaaaaaaagaaaaaaaatcagaagtgaacctgtagcctgtagtgtgttgccaaataaacttatttttagagatacttctttccattttctgtgaggtcatctgcagtttcacatggtagacagacttaggtgagattcttagcaacatagaatgaagagtaaagaggtttgtttatttcacaagggtttattgaaggcctacgatgtgttaaatgctgtaggaaatacccactgatttctcttttcatggaggtttcccgccttctcttaacgagtgatcaattaaactgtttactgggaacttgctaagttaatgaacacacgggatacattctttggatgagcagacattggttgggcagaggggcaagaggagagcagtttagacagagacctgcttatacactgtagtgtctaagagagcttgtgatgttcaggaaacagttgttcactgtgctgcaatataggggacggccagttgcggtggctcacacctgtaatcctagtgctttggaaggccaaggcgggcagatcacctgaggtcaggagttagaaaccagcctggccaacatggtgaaaccccatctctactaaaaacacaaaaattagctgagtgtaatggtggatgcctataatcccagcaacttgggaggctgagacaggagaatcacttgaacttgggaggtggaggttgcagtgagccgagatcatgccattgcactctagcccaggtgacagggtgagactctgtcaataataataataataataataataataataataataataataataatgtaggggacttgatgaagggaaaggatcagagagattctgaaaagaaggtagtttggggcccagtgatgactagattttaagtttcatatagtaggaagtggggcactagtaatttttcaagcagaaaaattatttgaccagattcgtgatttcaaaaatagctctggtgatagagtggaggatgggttggagcagggaataaggggaaatgaaaccgttataaaactcttaaagtgggctgggcatggtggctcacgcctgtaatcccagcactttgggaggctgaggcgggcggatcacgaagtcaggagatcgagaccatcctggctaaaacggtggaaccctgtctctactaaaaatacaaaaaattagctgggcatggtggtgggcgcctgtagtcccagccactcaggaggctgaggcaggagaatggtgtgaacccgggaggcagagcttgcagtgagctaagatcgtgccactgcactccagcctgggcgacagggcgacagagcaagaatccgtctcaaaaaaaaaaaaaaaaaaaaaaaacctcttaaaacaagtacagcaagaactttgagggtctttgctaagacagcagctggcagcttcaatttggagtagggtatcaaaggcaactgtgtataaggaatagttatataactggtatccaatttctgagatgattttgacttaaacattgtgtatttcccagcatactgttggtttttctaattatgtgggaaattatgttgcttttacttttttttttgctcattgcccagcctagggtgcaatgctgcaatctcagctcactgcaacctccgcctcccaggtttaagtgattcttctgcctcagcctcccaagtagctgggattacaggcgcccaccaccatgcctggctaattttttgtatttttggtagagacagggtttcacgacgttggccaggctggtctcaaactcctgatctcaagtgatccacctgcctctgtgtcccaaattgctgggattacaggcatgagccaccgcaccggccatgctttcagttttcaagaaagaagacaccattattgccaaagattttggtaatttgagagatacaatgtatgttttctccatgtggatactagatagtaaggatgtgttgaatttgaagtgtctatccagaagtattttgggtacttgtttaaggattgtaaaacaatgtttccatttctggatataataaatgtatttgttaatataataaatgaatagattagacccataaactatttgcagtgttgagtcatttcccacagttaaaatcaggatgaaaatatatagctgaatacctgctttgtttcttgtaactgatttctttagtacagaacctgctaaggccatcaaacctattgatcggaagtcagtccatcagatttgctctgggccggtggtactgagtctaagcactgcggtgaagaagatagtaggaaacagtctggatgctggtgccactaatattggtaagtttgggagagttttaagccacaagaaatgatcagtgaatgttgttgtagtcaagaaacatttgttattgaaataagactatcaagtgttgatgtagtaataaactattatttttaagttaaagttagcacctattatgtgcctagtacttagctaggtagtaataataataacgacagcttttcttgtgttcttatggtgtgccaggcaggtgttatgctaagaattgcacagaaatatctcatttaatttgcagaatagctgggcgtggtgtctgacgcctgtaatcctagccctttgagaggctgaggtggggggattgcttgaagccaagagttcaagaccaacctggccaacatggggagacctcgtctctattaaaaaataaagcaggccgggtgtggtggctcacgcctgtaatcccagcactttgggaggccaaggcgggtggatacctgaggtcaggaattcgagaccagcctgtccaaaatggtgaaactctgtctctactaaaaatacaaaaattagccagacctggtggcagaagcctgtaatcccagctactggggaggctcaggaatgagaattgtttaaatttgggaggtggaggttgcagtgaaccgagattgtgccactgcacgccagcctggggacagagcaagactctgtctcaaaaaaataaaataaaataaaataaaataaatcctggagtagtggctcacatctgtaatcccagcactttgggaggctgaggggggctgatgctttgaggtcaggagttcaagaccagcctaaccaacgtggtaaaaccctgtctctactaaaaatacaaaaattagccagatgtgatggtgcatggctgtaatctcagctcctcagaaggctgagggaggagaattgcttaaacctgggaggtggaggttgcagtgagccaagatcgattgtgccactgcattccagcctgggtgacaagagcaaaagtccatctcaaaaaattaaaaaaaaaaaaaaaaaaggaaagaaaaaaaagaaaatgacaaaattaaaaaaaaattattaatctgccaaataactttatgagatagaacttattacctccattttacagttgaggaaattaagggacagtaaatttcctttttttgagattataaagctaataaaatagaatctaggaagtctgattccagaaccagttctgtttttttttcttttttttttttttgagatagagttttgctcttgttgccgaggctgcggtgcaatggcacgatctcaactcactgcaacctccacctcccaggttcaagcgattctcctgcctcagcctcacaagtagctgggattacaggcatgcaccaccacgcctggctaattttgtatttttagtagagatagagtttctctacgttggtcaggctggtctcgaactactgacctcaggtgatccgctcgctttggtctcccaaagtgctgggattacaggcatgaaccactgcgcccggcccccgttctccttactgggtatgttaaaattatttctttcaaaggaaaaggctggtcaaagtgcaacggtctttacaactaattgatcacaaccagttacagatttttttgttccttctccactccaactgcttcacttgactagtgtaaggaaaaaaaaaagaggaaagaaagaaaatgctaaactatttaatctgggctagtaaatggccagaaagaactttataaaaatgaaatatacaaaatgacactagtatgtttaactaaaggtatagttacgacacttaaatttgcacgttataaataatatcaatataaaaactgatagcgtgggtccatttttaataaatatataaatattttaaactttctagatctaaagcttaaggactatggaatggatctcattgaagtttcaggcaatggatgtggggtagaagaagaaaacttcgaaggcttaagtaagttaactttctaatcctattacaaaataattgggccacatgtcttagaattttgagtaacactgtcttgggaaacacaaaaacagttttttaaagccagttactagatatcatgtatatttgttgttatagcacttgagatatcttagtccttactttacagtctctttcagctctgaaacatcacacatctaagattcgagagtttgccgacctaactcgggttgaaacttttggctttcaggggaaagctctgagctcactttgtgcactgaggtgagaaaatatttttatccattcacttgaccccttagaaaaacctctctgaaaattaattggaatcattattatttacaattttctatctcaatatctcagcttctagcttctgaattctgttttgtctcactgccaatctaagtcctagtacttctgaaatgtgagcaataaatgaatgaaatgaagcaaatagtattctttaaaaaattggttacccttattaaaacagtaacttctcaatttgaacataacatatagataataaatgatagttaccattggttttcattatcaatttttagggaaacatttcaccaaagcactatttaattacagcacagatactaaatttttataaataattacatgcacacacacatatatagacatatatatacatatatatacatatatatacatatatatacatatatacatatatatacatatatacatatatatacatatatacatatatacatatatatacacatatatacatatatacatatatatatacatatatacatatatatacatatatacatatatatatacatatatatacatatatatacatatatatatacatatatatgtatatatatatatatatttttttttttagacagagtcgcactctgtcacccaggctggagtgcagtggcacagtctcagctcactgcagtctctgcctcccaggttcaagtgactttcgtgactcagcctcctgaagagctgggactatagcgtgcaccaccactcctggctaatttttgtatttttagtagagatggggttttgccatgttgcccaggctggtctggaactccaggcctcaagtgatctgccctccttggcctcccaaagtgctggaattacaggcacgagccaccgcaccctgccctacatatacattttaattataatatcttttggattctttaaaaaaaattttaaaaattttaaaaaattctttaaaaaaattcttttaaaaaattttgtttgaagagtaataacaaaacaaatctctatttgagaatcaataaatcttgagatcatttatggttttgcaattcaacctgaaaaatgaagtcaaagcttttatcaaaacaaagcatgtttagtgctctctgtctcactgtcttttagatgccagaccttagattttgtgatgactcctcaaccgtttagatctcggttatctcagagggatcatcagctttttaagaaaattttgagagaaaagcaagtgaagaaaagagtagtcagtgcccaacatcatggatctctcactgaacacaccatgcctggtattctctcacagtgatgtcaccatttctacctgccacgtatcggcgaaggttgggactcgactggtgtttgatcacgatgggaaaatcatccagaaaaccccctacccccaccccagagggaccacagtcagcgtgaagcagttattttctacgctacctgtgcgccataaggaatttcaaaggaatattaagaaggtacagtaaattaatcctggttttcaagagtattggttaatgcacatgagcaaaagatttactaaagatgtttattcttcagttgattctcttcccataatttattgagaaatgctttatttgcatttctcattaaagacttaacttcaggatgatttacttttttctttttatcacataatgtttattaggactgggaaacatagtgagactctgtctctatgaaaaattaaaaaaaaaattgactgggcatggtggcatgcacctgtagttccagctacttgggaggctgaagtgggaggatcacctgagcccaggaacttgagactgcagtgagctatgattgcgtcactacacttcagactgtgagacagagtaagaccctgtctggaaaaatatatatacatatatatacattttttttattttttatttttatctttttttgagatggagtctcactttggcgccctggctgcagtgcagtggcgcgatctcagttcactgcaacctccacctgccaagttcaagcgattctcctgcttcagccttctgagtagctaccattacaggcgcgcgccaccacgcccggctaatttttgtattttcagtggagacggggttccaccatgttgtccaggctggccaggctggtcttgaattcctgccctcaggtgatccgcccacctcggcctctcaaagtgctgggattacaggcgtgagccaccatgcctgaccttatgtacttatatttttatgagaatatttctcttggttttctgataaatgagttactggaacccttatgaatttgaatgcaaatgaaacagctaaatgttatataattgttgtgtttaaaaagcagattataaaactgtctgtattatatgattacagttttataaaaacaaaacaggcctaaatgtgtatagtataaagactgaagagtcagcacttccatgttctcagcggttatccttggatgtgagatctcatgcactttttgctctcttctttgtgcctttccattttgcatgcgtatttcttataatctaaaaagttacttaaacatatgcagctaaaaactttttttacttgtaaagcgtttggtgctaattttaacttttttttttagacggagtcttctcactctgtcgcccaggctggagtgcagtggtgtgatcttggctcactgcaacctccgcctcctgggttcaagtgattctcctacctcagcctcccaagtagctgggattataggtgtgtgtcaccacacccagctaatttttgtatttttagtagagatggggtttcaccatgttggccaggctggtcttgcacccctgacctcaagtgatctgcccacctcagcctcccaaagtgctgggattacaggcgtgagccaccacgcctggcttttttttttaaagcttttttgtaagtcagccagcaagaacacaggaggaagtactcaaatctcccttacacagctgggggctgtgtcaggttttataagcatagggtaatgaggtgtgatttgattggatcttgcaataaagtaatgctgggaggtgtgatctgactggatcctgccatggggtgacaccaaaactcaatctgattggatcctggctcctgcctgggggtgtctggttcttaaatcggtccgagctcttcaggctgagctcttaggttccactccacggtggcacgcgtggttaacctgggcatgcacagggtacatgaccttcaacctgcaggtcgatggcaattggaaaacaactgacaacttcattacataaaagttgaactgattcgggtgcggtgactcacgcctgtaatcccagcactttgggaggccaaggcaggtggatcacctgaggtcgaggagttcaagaccagcctggccaaaatggtgaaaccccgtctctactaaaaatataaatattagccaggcgtggtggcgcacccttgtaatcccagctaccccagaggctgaggcagcagaatgcttgaacctaggacgtggaggttgtggtgagctgagatcgtgccattgcactccagcctgggtgacaagagtgaaactccatcaaaaaaaaaaaaagttgaactagatttggtctgatgcagttacagatttacaaaccgcgtcccaccctcctgccaacaccttccactcctcattcttgagggattagggatggaggtcatgcttctgtatcgacttcatgctgaccaggggcacttagtcccctaaagtgagaggaatgaaactcttgggcttctgagttcagatgagttctggggtcacccggagtagcttgaaaggctggtattgttgtaatacaagctgaaggtggaagtgttggatcctggaggacaaacagctcaccatccatttaaataaataggaccaaaaagtaacagaacagtggccacgaggggccccaacagaggaagaaaccaggtgaggtgtggtatagtggactcgactgccttctaaatctcagtggttgtccgggtgcggtggctcacgcctgtaattccagcaaaagaagagccgaggcagggtgatcacgaggtcaggagttcaagaccagccgggcaaacatggtgaaaccccgtctctactgaaaatacaaaaattagccaggtgtggtggcgtgtgctgtagtcccagctactagggaggctgaggcaggagaattgcttgaacctgggaggcggaggttgcagtgagccgagattgtgccactgcactccagcctaggtaacagagcaggaccccatctcagtcaatcaatcaatctcagtggttgaactacccttgatatggttcagctctgtatccccaaccaaatctcatgtccaattgcaattcccagtgttgagggagggacctggtgggagatgattggctcatggcggctgacgtcccccttgctggtctcgtgatagtgagtgagcgctcatgggatctggttgtttagaagcatgcagcacctcctgcttcactctctctgtctctcctgctccaccatggccagaaacgtgcctgcttccccttcgccttctgccgtgattgtcagtttcttgagggctccccagccatgcttcctgtacagcctgcaaaactgtgagtcaattaaacctcttttcttcataaattccccagtttccagtagttctttatagcagtgtgaaaacagactaatggacccttctggttgaaggaatgtagccattctgcttgtttaagtatttcctttctattcatctctatttcccgggaggtgtttatccaagtgcaataggagatattggtgactgcagagtcccctcagtgttctgctagtaaatagttgaaggttgatcagtgatctccagcattttcagtctggcatggaaaagcccccatgtaactggtaaaggtatcagtaagcaccaggaggtatctaaatccaccaggagccataggcatcatgttgatgtccatttaccagtcttccctggcaagattctctgaattgtactgccttggccaaaagaggtatgggaggggctgggcacagtggctcacgcctgtaatcccagcattttgggagaccaattcgggtagatcattagaggtcaggggttcaagaccatcctggccaacatggtgacattccatctctactaaaaatacaaaaagtcagcggggtttggtgttgggtgcctgtaatcccagctactcgggaggctgaggcaggataatcacttgaacctgggaggaggaggaggtggcagtgagctgagatctcgccattgcactccagcctgggcaacaagagcgaaacttcatctcaaaaaataaaaaaagaagtctgggtgtggtggctcgtgcctgtaatcccaggactttgggaggccaagatgggtggatcatgaggtcaggagttcaagaccagcctggcctagatggtgaaaccctgtctcgagtgaaaatacaaatattagctgggcatggtggcacacacctgtaatctcagctactcagaagtctgagacagaagaattgccaaaacccgggagggagaggttgcagtgagccgagatcgcgccactgcactctagcctgggcgacagagcaagactccgtctcgaaagaaagaaagagaaaggaaattccccagggaagtacctcggcttatttcatgaagaggtactgaaggaagcagaggcatgtggaggacttccccacctcgtgcagctatttgggccgtggcgtctgaaatttcttatttcagagtcacccctttgatgaccttggcagtggactgcagtcatctgtttaggcctctccatggcccgtgtcaatgccgatatttctgtctgttgcacatttgatttccttgctgttggcatttagaaggccccctgtttcccagatcacaccacgggcatggaccgcagagattgcatcttgtgagtctgtagaaacagtcaaggccttgtcctctcttaggtccagagctcaggtgaatgcagattttcccggccatctgtgctgaagtccctgtggggaggctcctggctggtttcctgtaggtagacagctacacatcctgcccttcattggcttcttttcatgaagctcctgctgtctacaaaacatgtctcccttttcttcttgaaccacatctctgttattgaaactctagaagtcagccaggcacagtggctatgcctgtaatcccagcactttgggaggccaaggtgggtggatcacctgaggtcaggagttcaagaccagcctggccaacatggcgaaaccctgtctctaatacaaatactaaaattagccaagcatggtggccactgcactccagcctgggtgacagagcaagactctgtctcaaataaagaaagagaaagtatcatgcttttcagagttctgtgggttgttatggtgaattatcaaacctgaggacgtggtgggaacctccaaatttgcagccagttggtgagaagtacatgcggtctgtggacacccaagcttgcagctgcatctgaagcgagggcagcctagcgggggctggtggccttaacctgtggcatttgatgtaacatcagggagttgacatcagaattacgtcacacaggccaggtgcagtggctcatgcttataatcccagcaattagaaaggcaagataagaagattgcttgagcttgagtctgagcccacagtgagctatgaccgcaccactgcaccccagtctgggtgacagcacaagaccccgactccaaaaataaaaaagaaaaatcacaaagaattgcatggcagagtgcctgtctttcacagcttgaactgttgcaggaactttctttttttttttttcttttgtgatggagtctcgcgctttcacccaggctggagtgcagtggcgcgatctctgctcactgcaggctccgcctcctgggttcacaccattctcctgcctcagcctccggagtagctgggactacaggcgcctgccaccgtgcccagctaattttttgtatttttagcagagatggggtttcaccgtattagccaggatggtcttgatctcctgacctcatgatccacccacctcagcctcccaaagtgctgggattacagtcctgagccaccgcgcctggactttttttttttttttttgagaggggttggggagacatattctctgctagtgattctcctgcctggtctcgaactcctgctgggatcacaggcgtgagccaccacgcccagccacctttagagttttcttaccacctggttttcctctctcaatatctttctctcatttcctgctttaaaactctagcttggggtctgggcacagtagctcatgcctataatcccagcactttgggagactgaggcgggtggatcacttgaggtcaggagtttgagaccagcctggccaacatggtgaaaccttgtctctactatttttacaaaagttagtcagacgtacaggcggatgcctgtagtcccagctacttgggaggctgaggcaggagaatttgcttgaacgccgaggtgaaagttgcagggagccgaggttgtgccactgcactccagcctgggagacagagcgagactgtctccaaaacaaacaaacaaacaaacaaaaaaaaaaaccctgtagcttgggatcagccttctcttctgttgtttttctttaaaaaataaaaattaaaaataggcttcaagtgatcctcccgccatgacctccaaaactgctgggattgtaggtgtgagcactgcacccagccgtatgtttttttctacataaaaaacagcacaggattatcttccaaagctaacaaatatgttcaaataaccacaaccccattaaggaaaaatgtcacttgacagcaaataatcaatccagaccacaatatgatcacactcactgtgaaggtgagaaaagttcatctttattatgtttccccaagagatgcactgcactgttctcttgaaaacacacagctcatgtcctcctttagaacacacatcctctttaaagtaacatacaaacatgccaaaacaagataaaaaattccatctgaattctcacatttcaaacatacactaaatatcaaataaaaatttatttttacaagaatttaggggaactaccacatagctataaatgtaatatatatgttaactaagtatcatagataaaaaccatgctcccttcagcagcacgtgtaataatagatacaaagattgaaaggtaaaagatttaggatgaaaagaatcctctcttaaaaaggaaaacaaaattatatgtatgtgtatacaacagttataatacccatcacacagctttatagaaacagcatctattcaaaaataccagtatttccaaaatatttaaaataatatttaaagtaataataatatttaaataaataaatatatttaataaatatttcagtaaataaaataatatttaaataattctatacccatgtttttcaaaataaaccaataaaatagatagtatatattagacgtgttagtatatatatctgagacatgttaaaaatcacaactgaattctcacaagtcagtcacaaacctaaacagcaaataaaaatttctatcaccagaattatgtttttttctggtggggaactaccaatagctataaatagaagagattattatggaagtatcatagataaaaagagtgctcgcttcaggagcacatataataatacagaaaaaaatttaaagataataaaagatttaggataaaaagaattctcacttaaaaatgaaaagaaaattatctttaggtatatataacaactataactctcatcaaaaaactctacaggaacagcatgttttcaaaagtacaacaatttccaaactatttgaaataaacctattaataattcaatggccaacattttccaaacaaaccaataaaatgcatagtgtgcatgaagctatctgttacagtctgtggcactcatatttcacaaagaattctgtgccaatctgagcccctgcactgtgccttcaaatgctcctggactgtggcaaccaagtccataagaaacaggacctccaggttccgccccagggaggttggcattcagcaatataaaaagggaggtggtgccgcaggaaagggtggaactggaaacactcctggtttcttacttttctccaaggactcctagaagtaccccaccccacccctgctccttggaggacaacgtgatcactgtattcagctctgtcaagaatggtccaggttcttctagatgatctgcacaaatggttcctctcctccttcctgatgtctgccattagcattggaataaagttcctgctgaaaatccacatctcccctgggtccggtgttctggaagtgagagagacaatgtcacacttcaaggaggcagctctctagacaggaaggttattcacgtcccatgtcaagtctagctagagttcagagcaattgagaagtgcaattttatctcctgcctttcattctataccctgcttctgaaccatcgtgttcaactgtgaaactcacactttggtgaccctgactccaaaacttaatacacccaaggtcagccccagtgatctgcttcatagccaggactttgggtgggtcttcccagggagtagggcaccctcagagaatgtggctttggacttcatcacagctggggccttttgtgtcacttcagatctaaacttgtaaccgtgctagatctgtttctaacgtgacagcatcacgaaccatgagtccagaagcctaatccataatcctccctcctcatgacgaagtctcatgctctgtgctcaacatggttagctgcacaagatgtaaaccaaagcttcactgaaccctcgacccaaatcggtaactcaagtgcatcaatcataatgaacctccccgaactcagtatttatgattatttttgaggcagggtctcactctgtcgcccgggctggagtgcagtggcaggatcagggctccctgcagccccgacctcccaggctccagcgatcctcccgcctcagcctcctgagtagttgggagtagagatgcctcccacatcgcctggctaatttttgtatttttgtggagaggggatctcgccacgttgcccaggcttgaagccagatcaagcaattgggttccttggatttccgaaatagaccccaatattctgcctttaccccggaggatgcagatgtaccttctctcaggccgatgacctcaggcctccacggtccctggagctctaggaaaggtgggcgcgatctcgcgcccacacccagtgctctgggtcataagcctggatctggaaaaacaaacgcgctttgagaagacggggactccccaggatacccctctctcccctcgtccagcctccagcccacccgattcctccccacatcctccacgtccccaggccccacccacctcttccaactcctccagggaaacccaagccctgcagcgcatggaacaaaagaagtggaaccgatacttccggaacaaggctatctgagagcagttcttcctggccctcgggttcatgtaacggcataactggaaccaaagctcactgagcaagggtatatgagagcgggtctcctcgtacaggaagtagaagatgttttgtttgggggcctcgtcgtcctcctccatgtcattggccagatagctgaggacagaaatcaggttgctgctcaggggcaccaccaggagagacctccggctgaggtcagcttctcagagaggaaggtaagggaccgtccctagctcaggactggcacccaccctgcagagagccacgccttcctcaggagggctctgctggacagagacctgatcaagggcgtctcccactccttcaggatggagacaaaaacccaactggtgaccaagagtggtggcttatgcctggaatcccagcacactgggaggccgaagcaggaggatcacttgaggccaggagtttgagacaggcctgggcaacatagcaagaccctcgtctctattaaaaatataaaaaatacgccagacgtggtggctcatgcctgtaatcccagcgctttggaaggctgaagcaggtggattgcttgagaccaggagtttgagaccagcctggtcaacacagagaaaccccatctatactaaaaatacaaaaatcagcctggtgcggtggcacacccattagtcctagctactcaggaggctgaagcataagaattgtgtgaacccaggaggcggaggttgcagtgagccaagattgggcccctccattccagcctgagagacacagcaacactcttgtcttgataaataaataaataaataaataactgtccaggtgtggtggtacagccctgtagtcagagctaatcaagaggctgaggtgggaggatcgcttgagcccaggatatggaggctgcggtgagctatgatctcaccactgcactccagcttaggggacagggcaagtctgtctcaaaaaaaaaaaaaaagcaattgaatacactgatattttgccaggaccctgccttctacaggcatctagtctaatgggactgggagtaatcaggggagatgacctaatcccaatgtcacattataataggatgtaactggagagctacgggcatgcagaagttggaagacgagggaaggcatcacagaggctgtggggtgaaccgacttcaaggaatgggtccttcccttcagaaccacatgtgtgcgggacacccagacagaaaacacaaatgcaaagtcaagtggagggcatttggaaggagcagtgaagccaagccaggaaacaccaagatggcgagccagtgtggttgtagagattgtagagagggtggaattggcactgtggaccctggcctcgatagagaaagacatcagctaaggaagttgttcaggtgggcagtgaggttgtcgtgctttggaaagatgttcaggctgcactaggaagccccctggcttggggagagactccaggaaaccccagcagggagcatttgacagtggattcgagtgatgcaagggggacctggactgtgacctctgtcacgggaacccggaggaggctgatggcttttgcggttgatgtgggaaggagagagaacaaccggaaacgtctgcttgctgggggaagtgtcatgtccgctcctccgctccttttcttctccccttaggagcggttcatggttccttttgttttttgttctttttttttttttttttgagactataatcctgtcttttttgtacacagagtaaagaggacaaataggtgaaagaataaatgaaaggctggaatcccacttcccccgctgtcccagggcattggatattgacggataggaggcagcaaaccactcacagagccaggaagaaatgaatgcgttggtattgccaggaggggaggccggcccggctgaaatacgctatgaccatagccaggagatactgatggagagaaaggaacacagagagggagaggtcacatcttgggagaggaagattgtggatatagtggaatgggggtctggggaggggttgcccatcagagaagggacctcagtgttggggtgactgtgctcatgtggaaattgcggggtggaggggtattcgaaggtcggatgcaaatccgagaagccggaggaagggtttttggtgatgctcccaggatggtgggctccgatgggatctttggagggggtgtgtctaggtcggctggtgtcaggagggtcttttgtgtgccaggcagagaactgtcccaaggagctgagagtagagggcccaggagcttcagggctgcagccagactgtggcccagggctcagatcccaaaggacccataggagaggcaggggccactcattcactctgcaagagaccagcagaatcctgacggagatgctgacaaatcataaaaagacaaagaatagccgggagtggcagctcaagcctgtgatcccagtactttttgagaggtggagacaggaggatcatgtgagcccaacagttggagaacaacctgggcaacacagcgagaccctgtttctaagaagatttcaaaaattagttgagcatggtagcatgtgcctagtcccagctcctcaggaggctaaggaaagaggattgcttgagcccaggaattagagtgagctatgatcatgccactgtactccatcctggggagcagagctggactctgtctcagaaaaaaaaaatgtgtgggtgccaagactcaagaccatgggagctggtcagacacagtgctgacgtctgtaatctcagcactttgggaggccaaggcgggtggatcacctgaggtcaggtgttcgggaccaatctggccaacatggcaaaaccccgtctctactaaaaacacaaaaattagccaggcgtggtggttcatgtttgtaatcccagctgcttggaggctgaggtgggagaatcgcttgaacccaggaggcatcagctgcagtgagtcaagatcgagacactgccctccagcctgggcagcagagcaagactgtgtctcacaaaaaaaaacaaaaacaaaaacaaaaaaaaactgtaggagcatctggtgggaggtggtggacggagaactgtgggtttggaagctgcgccctccccctggccgtgcgttagaacaggaacacagttacatagagaacaaccttaccttgtccgacaccctcagatctttgtcccaggccaggagtcttttaatgacaggatcctctgtgattagagagcagatgtcagtgtgagaagcaggacagggtttccgtgagagcagcagggcagcgaggagaagtgtgcctcccgggggaaagtctcaggattgtggccgcgggtgaggtggatgagagaggggagaatgactttcactgggcaagggagagaggctcctgctctgagactcccctgagaagaggccgaaggaggccctgggtgtgagaatctacaggatgtagagctgggaatcagccaggaccccctccagcagacacagagggaccactgcagagtcataaaggaattcccatcatttcctcatgagacagtcacacatcagggtgtgaccatggccttgggatccctcactatggatggagacacttaggtttagaaaagtcagtaagaaacattaagtttcagagggcacagctgaaaccacttttttgatttttgattttgtttttctttatttgatttttatttttatttatttattaatttattttgagacaga

SEQ ID NO: 1714 - DNA, 4713 bp, Homo sapiens
cagactggagtgcagtagcacgatctcggctcactgcaccctcttcctcccaggctcaagcgattctcctgtctcagcctcccgagtagctggaactacaggcatgagctactgtgcccagccttggtttttcttttgacgcagagttttgctctgtcacccaggctggagtgcagtggtgcagtcatagctcactgcagcctcaaagtcctgagttcaagcaatcctcttgcctcagcctcccaacgtgctgggatctcaggcgggagccacagcgcctggcccaaaaccaagctttcttatcccaagcaccgacctttatcaagtctacctaatcctctgttgtctcctaagtgtccctcatgagtgatcacttcagagtcctcccgcatggagagctcacccactggggcatatttttcccattggaaaagtgtggttattggaagtttcctctttttagaaagaacaggattggaggtgctctctggggtgtcctcctaccaagcagcctgttgaaggcctcgtagtactcagggagcacgagcgacactcgccgtcgcttcgccttcatcttgaggccacacagcgtctccgccacccaggtctcctcaggctcaggggcgagctccttctctggctcatcatcagattcatccaaacactccctcttccttttgcagccaagggacctacgtggggggctgggatctaccccaggggctgagtaaagaaaccaggccaccgtgtaatgcttctgcaactgatcacgttagaccccgaccccaaaccccaaaccattctccatcctccccagcctctcagactgctggcttctccaagccacctttctgactttctcctctgctcaaccccatgtgccactccttcccctccccattcttccctctctctgtcctcagaacactgcgtcatatcgttccctggtccctggctctctgaggccctctttttttttttttgtttcgagacagaatcttgctttgtcacccaggctggagtgtagtggtacaatctcagctcactgcaacatccatctcccggattccagttattctcctgcctcagcctctcaggtagctgggattacaggtgcctgccataatgcccagctcaattttgtacttttagtagagacggggtttcgccatgttggccaggctggtctcaaactcttggcctcacgtgatccgcctgccttggcttcccaaagtgctgggattacaggtgtgagccactgcacccagcctgaatttctccattcttcccacacaccctccccaggttctccttcctgacctctgacccttcttttttttcttcttctttttttttttttttttttgagacagcgtctcactctctcacccagactggagtgcagtagcacgatctcggctcactgcaccctcttcctcccaggctcaagcgattctcctgtctcagcctcccgagtagctgggattataggcacacaccactaccgcctggctaatttttgtacttttagtagagatggggtttcaccatgttggccaggctggtcttgaactgctgacctcaggtgatctgcccgcctcggcctcccaaagtgttggtgttacaggggtgagctaccgcacctggcccccttccttcgtcttagtcaatcctatgccacctcttcttcctccagtcccctcacctgatggtcccgacacttcatcatccaccacctcctggagggggtaccctgaggtgctccgctgggggctctgctcttcctggggctgcggttgatggctcgtcatgatctttcccaaaatctgtccaatctcaccgaagctagtctctgttctgtccttggtcttcttctggacactgctgggatccagaagagtgtgttatcaattctcgaggctgggagaagtcaggagtggagaacagctctgagaagttactgttgttcacctgaactgccaggcgccgacagagtccggtccttccaatcaggaaggtcggaatctctgatgtcataggtcattccaacctggcaaccagtttgaacaaaaacacatgtaactgccaggctgatctcttgtcctggagatcctgggtgaatggtatctcctgccactgtcccaacctcagaccactgtccaaaagcatcttcagggtctccgcatccctctgttccctgtcccagcagaggctgtgtcctctccactcaaagcttgaagcgtgttggggtctcctcttctctgtacatgcccgtttcagagtccagtctggtgggagagggatcaggatgggaaagaaaactagggtaagcagaaacgatgaaaccttataagagtgagagtatcatgtacaagagatcccaggaacattgacttgatgaaaaagtcacatcagagcactcaatttggcagagcttttctgccgaatgtttactgatattcactgtccgagattctgtactgggtgtaacgtgtcctctgccctaaggcatctttgagtccaagagatattttgaggactggaaatcatcggaaactgcccatgagctcacacatatttccaatggtgtccccagtttcagggagtccacggatcacctaaagccagcccctccagtttggctaagaaactctatatatcaagttttgtatcatatgtattgctcttaactcagaaattccaccatttatagcagtggtttatttatttatactattgaaggaaatggtttatttatgaatctatattatggatattctataagatactgggtgtacaaaaagactaagtcgaaaaatctcagctgtgcacagtggctcatgcttgcaatcccatctctttgggtggccaagggaggaagactgcctgaggccagcagttcaagaccagtgtaggcaacatagcaagaccccatctcaaacaaaacaaaacaaaacagaacaaaattagccaggtgtcgtggctggcacctgtgttccaacaacttgagagactgaggtggcaggaggattgcttgagcctaggagttaggggctgcagtgagctgtgatcgtgacaccgcactccagtctgggcaacacagcaagaccttgtgtcaaaaaaatttttttaattaaatataaaagagtttcatgacattcagagaccatccaaagaacctgtgggttccggccaggcacagtggctcacgcctgtaatcccagcgctttgggaggccatagcaggtggatcgcttgaggtcaggagtttaagagcagcctggccaacatggtgaaaccccatctcttctaaaaatacaaaaaattagtcaggcatggtggtgggtgcctgtaatcccagccactcaggaggcgggggcagcagaatggcttaaacttgggaggcggaggttgcagtgagccaaggtcgcaccattgcactccagcctgggcaacaagagcaaaactacatctcaaaaaaaaaaaaaaaacaaacaaaaagaacctgtggatgagttcccacatggcttcctaacgggctgcggctctcctaggagtctctcgctcatgggaaaggcacaaactgaatgtggaaggaaatcccattgctgtggaagtcccattgttaggaagctctgcttttctggagttcaaatttgcattcatgacgctttaaaccgtcagagctgggtgtgtcctcctacaacaaatcactttactctctctctctcctagttaacaggctttcaaatattagaacatccatgttctgacctcattaaaattgctcttttgtggaatgaaaagctctgatttaacccgtctttaagcctggtatgcatattcctctctgttccggccaccttgtctagacacactacactgaggcagtgcccatcttagatgatgttgatacattgtcaaaaaatgggcaaaccaggcgcggtggctcacacttgtaatcccagcacttttggaagccgatgccgacagataaccagaggtgaggaggttgagatcagcctggccaacatggtgaaacctgtctgtttttctgtaaaaatacagaaacaatgagctgggtgtgggagtgcacttctgtaattccagctacttgcggggctgaggcaggagaatcacttgaaccgggatggtggaggttccagtgagccgagatcacgacactacactccagcctgggcgacagagtgagactccgactcaaaaaaaaaaaaaaagtgccagacagcccaggtttggtctgatatgttcagaaaaaagcaaaacagtcacctctcaccttttcttttcctgcaatgatgccgtttaatacaacaatggctgtaggtctgcggcagaaatatcattcaagtgaaacagaagggctttcctggctggacacagtggtcactcctgcaatcccaacactttggttggctaaggtgggaggatttcttgcggccaggagttcgaggctgcagtgagctgtgatctaccactgcattccaggctgggcatcagagtgaggcctgtctctaaaaaaaacccttcactccccaaaaaaagggattttcaaataccagcctttcagcatgaggatcacatggaggaacattaagacacagatgctgggacccagccctattgattgtaattaaaaaactgaggtgaggcctgatttagctccatcattggaatccattcagatttgaaa

SEQ ID NO: 1715 - DNA, 20991 bp, Homo sapiens
gggaaaatcatccagaaaaccccctacccccaccccagagggaccacagtcagcgtgaagcagttattttctacgctacctgtgcgccataaggaatttcaaaggaatattaagaaggtacagtaaattaatcctggttttcaagagtattggttaatgcacacgagcaaaagatttactaaagatgtttattcttcagttgattctcttcccataatttattgagaaatgctttatttgcatttctcattaaagacttaacttcaggatgatttacttttttctttttatcacataatgtttattaggactgggaaacatagtgagactctgtctctatgaaaaattaaaaaaaaaattgactgggcatggtggcatgcacctgtagttccagctacttgggaggctgaagtgggaggatcacctgagcccaggaacttgagactgcagtgagctatgattgcgtcactacacttcagactgtgagacagagtaagaccctgtctggaaaaatatatatacatatatatacattttttttattttttatttttatctttttttgagatggagtctcactttggcgccctggctgcagtgcagtggcgcgatctcagttcactgcaacctccacctgccaagttcaagcgattctcctgcttcagccttctgagtagctaccattacaggcgcgcgccaccacgcccggctaatttttgtattttcagtggagacggggttccaccatgttgtccaggctggccaggctggtctcgaattcctgccctcaggtgatccgcccacctcggcctctcaaagtgctgggattacaggcgtgagccaccatgcctgaccttatgtacttatatttttatgagaatatttctcttggttttctgataaatgagttactggaacccttatgaatttgaatgcaaatgaaacagctaaatgttatataattgttgtgtttaaaaagcagattataaaactgtctgtattatatgattacagttttataaaaacaaaacaggcctaaatgtgtatagtataaagactgaagagtcagcacttccatgttctcagcggttatccttggatgtgagatctcatgcactttttgctctcttctttgtgcctttccattttgcatgcgtatttcttataatctaaaaagttacttaaacatatgcagctaaaaactttttttacttgtaaagcgtttggtgctaattttaacttttttttttagacggagtcttctcactctgtcgcccaggctggagtgcagtggtgtgatcttggctcactgcaacctccgcctcctgggttcaagtgattctcctacctcagcctcccaagtagctgggattataggtgtgtgtcaccacacccagctaatttttgtatttttagtagagatggggtttcaccatgttggccaggctggtcttgcacccctgacctcaagtgatctgcccacctcagcctcccaaagtgctggggttacaggcgtgagccaccacgcctggctttttttttttaaagcttttttgtaagtcagccagcaagaacacaggaggaagtactcaaatctcccttacacagctgggggctatgtcaggttttataagcatagggtaatgaggtgtgatttgattggatcttgcaataaagtaatgctgggaggtgtgatctgactggatcctgccatggggtgacaccaaaactcaatctgattggatcctggctcctgcctgggggtgtctggttcttaaatcggtccgagctcttcaggctgagctcttaggttccactccacggtggcacgcgtggttaacctgggcatgcacagggtacatgaccttcaacctgcaggtcgatggcaattggaaaacaactgacaacttcattacataaaagttgaactgattcgggtgcggtgactcacgcctgtaatcccagcactttgggaggccaaggcaggtggatcacctgaggtcgaggagttcaagaccagcctggccaaaatggtgaaaccccgtctctactaaaaatataaatattagccaggcgtggtggcgcacccttgtaatcccagctaccccagaggctgaggcagcagaatgcttgaacctaggacgtggaggttgcagtgagctgagatcgtgccattgcactccagcctgggtgacaagagtgaaactccatcaaaaaaaaaaaaagttgaactagatttggtctgatgcagttacagatttacaaaccgcgtcccaccctcctgccaacaccttccactcctcattcttgagggattagggatggaggtcatgcttctgtatcgacttcatgctgaccaggggcacttagtcccctaaagtgagaggaatgaaactcttgggcttctgagttcagatgagttctggggtcacccggagtagcttgaaaggctggtattgttgtaatacaagctgaaggtggaagtgttggatcctggaggacaaacagctcaccatccatttaaataaataggaccaaaaagtaacggaacagtggccacgaggggccccaacagaggaagaaaccaggtgaggtgtggtatagtggactcgactgccttctaaatctcagtggttgtccgggtgcggtggctcacgcctgtaattccagcaaaagaagagccgaggcagggtgatcacgaggtcaggagttcaagaccagccgggcaaacatggtgaaaccccgtctctactgaaaatacaaaaattagccaggtgtggtggcgtgtgctgtagtcccagctactagggaggctgaggcaggagaattgcttgaacctgggaggcggaggttgcagtgagccgagattgtgccactgcactccagcctaggtaacagagcaggaccccatctcagtcaatcaatcaatctcagtggttgaactacccttgatatggttcagctctgtatccccaaccaaatctcatgtcaaattgcaattcccagtgttgagggagggacctggtgggagatgattggctcatggcggctgacgtcccccttgctggtctcgtgatagtgagtgagcgctcatgggatctggttgtttagaagcatgcagcacctcctgcttcactctctctgtctctcctgctccaccatggccagaaacgtgcctgcttccccttcgccttctgccgtgattgtcagcttcttgagggctccccagccatgcttcctgtacggcctgcaaaactgtgagtcaattaaacctcttttcttcataaattccccagtttccagtagttctttatagcagtgtgaaaacagactaatggacccttctggttgaaggaatgtagccattctgcttgtttaagtatttcctttctattcatctctatttcccgggaggtgtttatccaagtgcaataggagatattggtgactgcagagtcccctcagtgttctgctagtaaatagttgaaggttgatcagtgatctccagcattttcagtctggcatggaaaagcccccatgtaactggtaaaggtatcagtaagcaccaggaggtatctaaatccaccaggagccataggcatcatgttgatgtccatttaccagtcttccctggcaagattctctgaattgtactgccttggccaaaagaggtatgggaggggctgggcacagtggctcacgcctgtaatcccagcattttgggagaccaattcgggtagatcattagaggtcaggggttcaagaccatcctggccaacatggtgacattccatctctactaaaaatacaaaaagtcagcggggtttggtgttgggtgcctgtaatcccagctactcgggaggctgaggcaggataatcacttgaacctgggaggaggaggtggcagtgagctgagatctcgccattgcactccagcctgggcaacaagagcgaaacttcatctcaaaaaataaaaaaagaagtctgggtgtggtggctcgtgcctgtaatcccaggactttgggaggccaagatgggtggatcacgaggtcaggagttcaagaccagcctggcctagatggtgaaaccctgtctcgagtaaaaatacaaatattagctgggcatggtggcacacacctgtaatctcagctactcagaagtctgagacagaagaattgccaaaacccgggagggagaggttgcagtgagccgagatcgcgccactgcactctagcctgggcgacagagcaagactccgtctcgaaagaaagaaagagaaaggaaattccccagggaagtacctcggcttatttcatgaagaggtactgaaggaagcagaggcatgtggaggacttccccacctcgtgcagctatttgggccgtggcgtctgaaatttcttatttcagagtcacccctttgatgaccttggcagtggactgcagtcatctgtttaggcctctccatggcccgtgtcaatgccgatatttctgtctgttgcacatttgatttccttgttgttggcatttagaaggccccctgtttcccagatcacaccacgggcatggaccgcagagattgcatcttgtgagtctgtagaaacggtcaaggccttgtcctctcttaggtccagagctcaggtgaatacagattttcccggccgtctgtgctgaagtccctgtggggaggctcctggctggtttcctgtaggtagacagctacacgtcctgcccttcattggcttcttttcatgaagctcctgctgtctacaaaacatgtctcccttttcttcttgaaccacatctctgttattgaaactctagaagtcagccaggcacagtggctatgcctgtaatcccagcactttgggaggccaaggtgggcggatcacctgaggtcaggagttcaagaccagcctggccaacatggcgaaaccctgtctctaatacaaatactaaaattagccaagcatggtggccactgcactccagcctgggtgacagagcaagactctgtctcaaataaagaaagagaaagtatcatgcttttcagagttctgtgggttgttatggtgaattatcaaacctgaggacgtggtgggaacctccaaatttgcagccagttggtgagaagtacatgcggtctgtggacacccaagcttgcagctgcatctgaagcgagggcagcctagcaggggctggtggccttaacctgtggcatttgatgtaacatcagggagttgacatcagaattacgtcacacaggccaggtgcagtggctcatgcttataatcccaggaattagaaaggcaagataagaagattgcttgagcttgagtctgagcccacagtgagctatgaccgcaccactgcaccccagtctgggtgacagcacaagaccccgactccaaaaataaaaaagaaaaatcacaaagaattgcatggcagagtgcctgtctttcacagcttgaactgttgcaggaactttctttttttctttttttttttttttcttttgtgatggagtctcgcgctttcacccaggctggagtgcagtggcgcgatctctgctcactgcaggctccgcctcctgggttcacaccattctcctgcctcagcctccggagtagctgggactacaggcgcctgccaccgcgcccagctaattttttgtatttttagcagagatggggtttcaccgtattagccaggatggtcttgatctcctgacctcatgatccgcccacctcagcctcccaaagtgctgggattacagtcctgagccaccgcgcctggactttttttttttttttttttttttgagaggggttggggagacatattctctgctagtgattctcctgcctggtctcgaactcctgctgggatcacaggcgtgagccaccacgcccagccacctttagagttttcttaccacctggttttcctctctcaatatctttctctcatttcctgctttaaaactctagcttggggtctgggcacagtagctcatgcctataatcccagcactttgggagactgaggcgggtggatcacttgaggtcaggagtttgagaccagcctggccaacatggtgaaaccttgtctctactatttttacaaaagttagtcagacgtacaggcggatgcctgtagtcccagctacttgggaggctgaggcaggagaatttgcttgaacgcggaggtgaaagttgcagggagccgaggttgtgccactgcactccagcctgggagacagagcgagactgtctccaaaacaaacaaacaaacaaaaaaaccctgtagcttgggatcagccttctcttctgttgtttttctttaaaaaataaaaattaaaaataggcttcaagtgatcctcccgccatgacctccaaaactgctgggattgtaggtgtgagcactgcacccagccgtatgtttttttctacataaaaaacagcacaggattgtcttccaaagctaataaatatgttcaaataaccacaaccccattaaggaaaaatgtcacttgacagcaaataatcaatccagaccacaatatgatcacactcactgtgaaggtgagaaaagttcatctttattatgtttccccaagagatgcactgcactgttctcttgaaaacacacagctcatgtcctcctttagaacacacatcctctttaaagtaacatacaaacatgccaaaacaagataaaaaattccatctgaattctcacatttcaaacatacactaaatatcaaataaaaatttatttttacaagaatttaggggaactaccacatagctataaatgtaatatatatgttaactgagtatcatagataaaaaccatgctcccttcagcagcacgtgtaataatagatacaaagattgaaaggtaaaagatttaggatgaaaagaatcctctcttaaaaaggaaaacaaaattatatgtatgtgtatacaacagttataacacccatcacacagctttatagaaacagcatctattcaaaaataccagtatttccaaaatatttaaaataatatttaaagtaataataatatttaaataaataaatatatttaataaatatttcaataaataaaataatatttaaataattctatacccatgtttttcaaaataaaccaataaaatagatagtatacattagacgtgttagtatatatatctgagacatgttaaaaatcacaactgaattctcacaattcagtcacaaacctaaacagcaaataaaaatttctatcaccagaattatgtttttttctggtggggaactaccaatagctataaatagaagagattattatggaagtatcatagataaaaagagtgctcgcttcaggagcacatataataatacagaaaaaaatttaaagataaaagatttaggataaaaagaattgtctcttaaaaatgaaaagaaaattatctttatgtatatataacaactataactctcatcaaaaaactctacaggaacagcatgttttcaaaagtacaacaatttccaaactatttgaaataaacctattaataattcaatggccaacattttccaaacaaaccaataaaatgcatagtgtgcatgaagctatctgttacagtctgtggcactcatatttcacaaagaattctgtgccaatctgagcccctgcactgtgccttcaaatgctcctggactgtggcaaccaagtccataagaaacaggacctccaggttccggcccagggaggttggcattcagcaatataaaaagggaggtggtgccgcaggaaagggtggaactggaaacactcctgttttcttacttttctccaaggactcctagaagtaccccaccccacccctgctccttggaggacaacgtgatcactgtattcagctcttgtcaagaatggtccaggttcttctagatgatctgcacaaatggttcctctcctccttcctgatgtctgccattagcattggaataaagttcctgctgaaaatccacatctcccctgggtccggtgttctggaagtgagagagacaatgtcacacttcaaggaggcagctctctagacaggaaggttattcacgtcccatgtcaagtctagctagagttcagagcaattgagaagtgcaattttatctcctgcctttcattctgtaccctgcttctgaaccatcgtgttcaactgtgaaactcacactttggtgaccctgactccaaaacttaatacacccaaggtcagccccagtgatctgcttcatagcaaggactttgggtgggtcttcccagggagtagggcaccctcagagaatgtggctttggacttcatcacagctggggccttttgtgtcacttcagatctaaacttgtaaccgtgctagatctgtttctaacgtgacaacatcacgaaccacgagtccagaagcctaatccataatcctccctcctcatgacgaagtctcatgctctgtgctcaacatggttagctgcacaagatgtaaaccaaagcttcactgaaccctcgacccaaatcggtaactcaagtgcatcaatcataatgaacctccccaaactcagtatttatgattatttttgaggcagggtctcactctgtcgcccgggctggagtgcagtggcaggatcagggctccctgcagccccgacctcccaggctccagcgatcctcccgcctcagcctcctgagtagttgggagtagagatgcctcccacatcgcctggctaatttttgtatttttgtggagaggggatctcgccacgttgcccaggcttgaagccagatcaagcaattgggttccttggatttccgaaatagaccccaatattctgcctttaccccggaggatgcagatgtaccttctctcaggccgatgacctcaggcctccacggtccctggagctctaggaaaagtgggcgcgatctcgcgcccacacccagtgctctgggtcataagcctggatctggaaaaacaaacgcgctttgagaagacggggactccccaggatacccctctctcccctcgtccagcctccagcccacccgattcctccccacatcctccacgtccccaggccccacccacctcttccaactcctccagggaaacccaagccctgcagcgcatggaacaaaagaagtggaaccgatacttccggaacaaggctatctgagagcagttcttcctggccctcgggttcatgtaacggcataactggaaccaaagctcactgagcaagggtatatgagagcgggtctcctcgtacaggaagtagaagatgttttgtttgggggcctcgtcgtcctcctccatgtcattggccagatagctgaggacagaaatcaggttgctgctcaggggcaccaccaggagagacctccggctgaggtcagcttctcagagaggaaggtaagggaccgtccctagctcaggactggcacccaccctgcagagagccacgccttcctcaggagggctctgctggacagagacctgatcaagggcgtctcccactccttcaggatggagacaaaaacccaactggtgaccaagagtggtggcttatgcctggaatcccagcacactgggaggccgaagcaggaggatcacttgaggccaggagtttgagacaggcctgggcaacatagcaagaccctcgtctctattaaaaatataaaaaatacgccagacgtggctcatgcctgtaatcccagcgctttggaaggctgaagcaggtggattgcttgagaccaggagtttgagaccagcctggtcaacacagagaaaccccatctatactaaaaatacaaaaatcagcctggtgcggtggcacacccattagtcctagctactcaggaggctgaagcataagaattgtgtgaacccaggaggcggaggttgcagtgagccaagattgggcccctccattccagcctgagagacacagcaacactcttgtcttgataaataaataaataaataaataaataaataactgtccaggtgtggtggtacagccctgtagtcggagctaatcaagaggctgaggtgggaggatcgcttgagcccaggatatggaggctgcagtgagctatgatctcaccactgcactccagcttaggggacagggcaagtctgtctcaaaaaaaaaaaagcaattgaatacactgatattttgccaggaccctgccttctacaggcatctagtctaatgggactgggagtaatcaggggagatgacctaatcccaatgtcacattataataggatgtaactggagagctacgggcatgcagaagttggaagacgagggaaggcatcacagaggctgtggggtgaaccgacttcaaggaatgggtccttcccttcagagccacatgtgtgcgggacacccagacagaaaacacaaatgcaaagtcaagtggagggcatttggaaggagcagtgaagccaagccaggaaacaccaagatggcgagccagtgtggttgtagagattgtagagagggtggaattggcactgtggaccctggcctcgatagagaaagacatcagctaaggaagttgttcaggtgggcagtgaggttgtcgtgctttggaaagatgttcaggctgcactaggaagccccttggcttggggagagactccaggaaaccccagcagggagcatttgacagtggattcgagtgatgcaagggggacctggactgtgacctctgtcacgggaacccggaggaggctgatggcttttgcggttgatgtgggaaggagagagagagaacaaccggaaacgtctgcttgctgggggaagtgtcatgtccgctcctccgctccttttcttctccccttaggagcggttcatggttccttttgttttttgttctttttttttttttttttttgagactataatcctgtcttttttgtacacagagtaaagaggacaaataggtgaaagaataaatgaaaggctggaatcccacttcccccgctgtcccagggcattggatattgacggataggaggcagcaaaccactcacagagccaggaagaaatgaatgcgttggtattgccaggaggggaggccggcccggctgaaatacgctatgaccatagccaggagatactgatggagagaaaggaacacagagagggagaggtcacatcttgggagaggaagattgtggatatagtggaatgggggtctggggaggggttgcccatcagagaagggacctcagtgttggggtgactgtgctcatgtggaaattgcggggtggaggggtattcgaaggtcggatgcaaatccgagaagccggaggaagggttttcggtgatgctcccaggatggtgggctccgatgggatctttggagggggtgtgtctaggtcggctggtgtcaggagggtcttttgtgtgccaggcagagaactgtcccaaggagctgagagtagagggcccaggagcttcagggctgcagccagactgtggcccagggctcagatcccaaaggacccataggagaggcaggggccactcattcactctgcaagagaccagcagaatcctgacggagatgctgacaaatcataaaaagacaaagaatagccgggagtggcagctcaagcctgtgatcccagtactttttgagaggtggagacaggaggatcatgtgagcccaacagttggagaacaacctgggcaacacagcgagaccctgtttctaagaagatttcaaaaattagttgagcatggtagcatgtgcctagtcccagctcctcaggaggctaaggaaagaggattgcttgagcccaggaattagagtgagctatgatcatgccactgtactccatcctggggagcagagctggactctgtctcagaaaaaaaaatgtgtgggtgccaagactcaagaccatgggagctggtcagacacagtgctgacgtctgtaatctgagcactttgggaggccaaggcgggtggatcacctgaggtcaggtgttcgggaccaatctggccaacatggcaaaaccccgtctctactaaaaacacaaaaattagccaggcatggtggttcatgtttgtaatcccagctgcttggaggctgaggtgggagaatcgcttgaacccaggaggcatcagctgcagtgagtcaagatcgagacactgccctccagcctgggcaacagagcaagactgtgtctcacaaaaaaaaacaaaaacaaaaacaaaaaaaaactgtaggagcatctggtgggaggtggtggacggagaactgtgggtttggaagctgcgccctctccctggccgtgcgttagaacaggaacacagttacatagagaacaaccttaccttgtccgacaccctcagatctttgtcccaggccaggagtcttttaatgacaggatcctctgtgattagagagcagatgtcagtgtgagaagcaggacagggtttccgtgagagcagcagggcagcgaggagaagtgtgcctcccgggggaaagtctcaggattgtggctgcgggtgaggtggatgggagaggggagaatgactttcactgggcaagggagagaggctcctgctctgagactcccctgagaagaggccgaaggaggccctgggtgtgagaatctacaggacgtagagctgggaatcagccaggaccccctccagcagacacggagggaccactgcagagtcataaaggaattcccatcatttcctcatgagacagtcacacatcagggtgtgaccatggccttgggatccctcactatggatggaaacacttaggtttagaaaagtcagtaagaaacattaagtttcagagggcacagctgaaaccacttttttgatttttgattttgtttttctttatttgatttttatttttatttatttattaatttattttgagacagagtcttgctctgtgggccaggctggaatgcattggcctgatcttggctcactgcaacctctgcctcctgggtttaagcagttctcctgtctcagcctcccgagtagctggaactacagggatgagctactgtgcccagccttggtttttcttttgacgcagagttttgctctgtcacccaggctggagtgcagtggtgcagtcatagctcactgcagcctcaaagtcctgagttcaagcaatcctcttgcctcagcctcccaacgtgctgggatctcaggcgggagccacagcgcctggcccaaaaccaagctttcttatcccaagcaccgacctttatcaagtctacctaatcctctgttgtctccttaagtgtccctcatgagtgatcacttcagagtcctcccgcatggagagctcacccactggggcatatttttcccattggaaaagtgtggttattggaagtttcctctttagaaagaacaggattggaggtgctctctggggtgtcctcctaccaagcagcctgttgaaggcctcgtagtactcagggagcacgagcgacactcgccgtcgcttcgccttcatcttgaggccacacagcgtctccgccacccaggtctcctcaggctcaggggcgagctccttctctggctcatcatcagattcatccaaacattccctcttccttttccagccaagggacctacgtggggggctgggatctaccccaggggctgagtaaagaaaccaggccaccgtgtaatgcttctgcaactgatcacgttagaccccgaccccaaaccccaaaccactctccatcctccccagcctcgcagactgctggcttctccaagccacctttctgactttctcctctgctcaaccccatgtgccactccttcccctccccattcttccctctctctgtcctcagaacactgcctcatatccttccctggtccctggctctctgagtccctctttttttttttttttttttttttttgtttcgagacagaatcttgctttgtcacccaggctggagtgtagtggtgcaatctcagctcactgcaacatccatctcccggattccatttattctcctgcctcagcctctcaggtagctgggattacaggtgcctgccataatgcccagctcaattttgtacttttaatagagacagggtttcaccatgttggccaggctggtctcaaactcctggcctcaagtgatctgcctgccttggcttcccaaagtgctgggattacaagtgtgagccactgcacccagcctgaatttctccattcttcccacacaccctccccaggttctccttcctgacctctgacccttcttttgtttcttcttttttttttttttttttttttgagatagcatctcactctgtcacccagactggagtgcagtagcacgatctcggctcactgcaacctcttcctcccaggctcaagtgattctcctgtcttagcctcccaagtagctgggattataggcacacaccactaccgcctggctaatttttgtacttttagtagagatggggtttcaccatgttggccaggctggtcttgaactcctgacctcaggtgatctgcccgcctcagcctcccaaagtgttggggttacaggggtgagccaccacgcctggcccccttccttcatcttagtcaatcctatgccacctcttcttcctccagtcccctcacctgatggtcccgacacttcatcatccaccacctcctggagggggtaccctgaggtgctccgctgggggctccgctcttcctggggctgcggttgatggctcatcatgatctttcccaaaatctgtcccatctcaccaaacctagtctctgttctgtccttggtcttcttctggacactgctgggatccagaagagtgtgttatcaattctcgaggctgggagaagtcaggagtggagaacagctctgagaagttactgttgtccaactgaactcccaggtgccgacagagtccggtccctccaatcaggaaggtcggaatctctgatgtcatcgctcatgccaacctggcaaccagtttgaaaaaaaacacatgtaactgccaggctgatctcttgtcctggagatcctgggtgaatggtatctcctgccactgtcccaacctcagaccactgtccaaaagcatcttcagggtctccgcatccctctgttccctgtcccagcagaggctgtgtcctctccactcaaagcttgaagcgtgttggggtctcctcttctctgtacatgcccgtttcagagtccagtctggtgggagagggatcaggatgggaaagaaaagtagggtaagcagaaacgatgaaaccttacaagagtgagattatcatgtacaagagatcccaggaacattgacttgatgaaaaagtcacatcagagcactcaatttggcagaggttttctgccgagtgtctactgacattcactgtccgagattctgtactgggggtacacgcgtcctctgccctaaggcatctttgagtccaagagatattttgaggactggaaatcataggaaactgcccatgagttcacacatatttccaatggtgtccccaatttcagggagtccacggatcacctaaagccagcccctccagtttggctaagaaactctatatatcaagttttgtatcatatgtattgctcttaactcagaaaattccaccatttatagcagtggtttatttatttataccattgaaggaaatggtttatttatgaatctatattatggatattctataagatactgggtgtacaaaaagactaagtcgaaaaatctcagctgtgcacagtggctcatgcttgtaatcccatctctttgggtggccaagggaggaagactgcctgaggccagcagttcaagaccagtataggcaacatagcaagagcccatctctaaaacaaaacaaaacaaaacaaaacaaaattagccaggtgtcgtggctggcacctgtgttccaacaacttgagagactgaggtggcaggaggattgcttgagcctaggagttaggggctgcagtgagctgtgatcgtgacaccgcactccagtctgggcaacacagcaagaccttgtgtcaaaaaatttttttaaattaaatataaaagagtttcatgacattcagagaccatccaaagaacctgtgggttccggccaggcacagtggctcacgcctgtaatcccagcgctttgggaggccatagcaggtggatcgcttgaggtcaggagtttaagagcagcctggccaacatggtgaaaccccatctcttctaaaaatacaaaaaattagtcaggcatggtggtgggtgcctgtaatcccagccactcaggaggcggggacagcagaatggcttaaacttgggaggcggaggttgcagtgagccaaggtcacaccattgcactccagcctgggcaacaagagcaaaactacatctcaaaaaaaaaaaaaaacaaacaaaaagaacctgtggatgagttcccacatggcttcctaacgggctgcggctctcctaggagtctctcgctcgtgggaaaggcacaaactgaatgcggaaggaaatcccattgctatggaagtcccattgttaggaagctctgcttttctggagttcaaatttgcattcatgacgctttaaaccgtcagagctgggtgtgtcctcctacaacaaatcactttactctctctcctagttaacaggctttcaaatattagaacatccatgttctgacttcattaaaattgctcttttgtggaatgaaaagctctgatttaacccgtctttaagcctggtatgcatattcctctctgttccggccaccttgtctagacacactacactgaggcagtgcccatcttagatgatgttgatacattgtcaaaaaatgggcaaaccaggtgcggcggctcacacttgtaatcccagcacttttggaagctgatgccgacagataaccagaggtgaggaggttgagatcagcctggccaacatggtgaaacctgtctgtttttctgtaaaaatacagaaacaatgagctgggcgtgggagtgcacttctgtaatcccagctacttgtggggctgaggcaggagaatcacttgaaccgggaaggtggaggttccagtgagccgagatcacgacactacactccagcctgggcgacagagtgagtctccgactcaaaaaaaaaaaaaaaaaagtgccagacagcccaggtttggtctgatatgttcagaaaaaagcaaaacagtcacctctcaccttttcttttcctgcaatgatgccgtttaatacaacaatggctgtaggtctgcggcagaaatatcattcaagtgaaacagaagggctttcctggctggacacagtggtcactcctgcaatcccaacactttggttggctaaggtgggaggatttcttgcggccaggagttcgaggctgcagtgagctgtgatccaccactgcattccaggctgggcatcagagtgaggcctgtctctaaaaaaacccttcactccccaaaaaaagggattttcaaataccagcctttcagcatgaggatcacatggaggaacattaagacacagatgctgggacccagccctattgattgtaattaaaaaactgaggtgaggcctgatttagctccatcattggaatccattcagatttgaaattctctgagttggacagtgcaagagagatcctaaagaaagcaaagtcactgtggactgaaatgagctggcaaggttttctgagcgtggtgaaatatgatctgggcctcgcttgggagggctgtggccaggccttgagtccgtggctcagtgggaccttctgaaacagcctccaatccgtgcccccacttcatttgctagtggatgaccccctccagcggctttggtgctgatgggaataagtcaacctgcagcggaagttcagcccaagtttcagcccagcagcttctacacacctgtccgtggtctggtcatgctgccatctctgcggttctctgcggttctctgcggagtcgtggtttctgtaccttgaagagaacttcccctctgggacccagaaacccagtgaatcctcaggaaaaaagggaatgaaattactgaagacaactctgtggcggggagatggaaaagaggctctctctcttttttttttcctaatattttgagacagagtttcgctcttgtcacccaggctgcagtgcagtggctccatctcggctcactgcaacctctgcctcccaggttcaagcgattctcctgcctcagcctcccgagtagctgagattacaggcacccaccaccactcccagctaatttttgtattttagggtttcatcatgtttgccaggctggtcttgaacacctgacttcaaatgatccacccgcctctgcctctcaaagtgctgggaatacaggcataagacactgcacccggcctgtttttgttttttagagacaaggtctctgttgccttggctggggtgcagtggtacaatcagctctctgttgcctcctgggctcaagcaatcctcttctctcagcctcccaagtagctgagactacaggtgcatgcctgtagtagatatagcatcttgctctgttgcccagactggtcttgaactcttggtcacaagcgatcctcttgccttggcctctcaaagtgctggaattacacgcgtgagccattgagcccaaccagataagatgatctttaagggcccttcccatggtaccataatccaagtcagcgagactgtggctatagcaagtttaacataaccagatacgctagtattatgggctgcatggtgtgccccccacccctaattcatgtattgaagccatgaccctccagaccttagaggtgaccttattggaaccagagtctttacagaggtgatcaagttaaaatgaggtcactagaggccaggcacggtggctcacacctgtaatcccagcacttcgggaggccgaggcaggcagataatgagcccaagagaccgagaccatgatgtccaacatggtgaaaccctgtctctactaaaaatacaaaaattagccaggcgtggtggtgtgggcctgtagtcccagctactcaggaggctgaggcaagagaatcgcttgaacccggaaggcagagattgcagtcagccaagatcatgccactacactccagcctgggtgacagagtgagactctatctcaaaaaaataaaaattaaaaaactaaaaacctacagtaccgccttttacataatgcaatggtttggtaagcacatgcaccccagggaggtagtggcagattcagtcaaccttcccagcagcgtggagacgcagtcaggcatagcaggtgttgatgtggtttgaacccacagcttggctcaaatccacactcccctacttagtaccgagtgaagccacttaccctctaagtgccttacttttcttttcttttcttttttcttttttcgagacagagtctcgctctgtcacccaggctggagtgcagtggcatgatcttggctcactgcaaacttcgccttccaggttcaagcaattctcctgcctcagcctcccaagtagctgggattacaggcgcccaccaccatgccgggctaatatttgtatttttgatagagatggggtttcaccatattgcccaggctggtctcgaactcctgacctcaagtgatctgtctgcctcggcctcccaaagtactaggattagaggcatgagccaccacacctggccacttttcttatctatatttgttatgtggatgacttgtgttaacgcaaataagatgctgctcgtcatctttaaagaaaataggtggcaacctgttatagcaagtcctgtttttatttgtacttatgaggctttaattaaacgctaagaattaaaatgcacataataatagactttacctcacaaactggcttcaattattcgatgagacttacatgtattacttaaatgaggttaaatttaaccttttaaaaatgatttattgtggctgggcacagtggctcacacctgtaatcccagcactttgggaggccaaggcagatggatcacttgaggccaggagttgaagaccagcctgaccaacacggcaaaaccccatctccgctaaaaatacaaaaattagccaggcatggtggtgcacacctgtaatcctagctactcaggaggctgagacacaagaatcgcttgaacccgggaggcagaggttgcaaggaggtgagatcacaccactgcactccagcctgggcaatagagtgaggctctgccttaaaacaaagaaaaatgattttgggggatgatggggtgtcactatgttgaccaggcttgtctcaaactccttgcctcaagcaatccacccacctcagcctcccaagtagctggaactacaggcgcatgccaccacgcctggctaatatgtgtgtgtgtgtgtgtgtgtgtgtgtgtgtgtgtgtgtgtgtgtagaaacaaggtcttactgtgttgtttaaactgctctcaaactcctgggctcaagtgatcctcccacctcggcctcccaaatcattggaattacaggtgtgagccacctcactgagccctccacctttcagctgaacgcagaaaagtacaatcttttaacccaaagcgttcctcacacttagggtcaggaagagcccttcatgccctggaggcaactactaaccctctgctaaacactctgactctgggtgtgagaaacacacctactgtgccccacatatttttccaaatacaacttaatttagccttcacgacaaccctggagtgaaggatcattaactttatttcatagatgtggaaactgagactcagaggcaggaaatgacctccttctggaggctgcaaattctttgatgctcctttgatcaacaggtgggagctggccagaggtggtggctca

SEQ ID NO: 1716 - DNA, 8923 bp, Homo sapiens
gcgcccacacccagtgctctgggtcataagcctggatctggaaaaacaaacgcgctttgagaagacggggactccccaggatacccctctctcccctcgtccagcctccagcccacccgattcctccccacatcctccacgtccccaggccccacccacctcttccaactcctccagggaaacccaagccctgcagcgcatggaacaaaagaagtggaaccgatacttccggaacaaggctatctgagagcagttcttcctggccctcgggttcatgtaacggcataactggaaccaaagctcactgagcaagggtatatgagagcgggtctcctcgtacaggaagtagaagatgttttgtttgggggcctcgtcgtcctcctccatgtcattggccagatagctgaggacagaaatcaggttgctgctcaggggcaccaccaggagagacctccggctgaggtcagcttctcagagaggaaggtaagggaccgtccctagctcaggactggcacccaccctgcagagagccacgccttcctcaggagggctctgctggacagagacctgatcaagggcgtctcccactccttcaggatggagacaaaaacccaactggtgaccaagagtggtggcttatgcctggaatcccagcacactgggaggccgaagcaggaggatcacttgaggccaggagtttgagacaggcctgggcaacatagcaagaccctcgtctctattaaaaatataaaaaatacgccagacgtggtggctcatgcctgtaatcccagcgctttggaaggctgaagcaggtggattgcttgagaccaggagtttgagaccagcctggtcaacacagagaaaccccatctatactaaaaatacaaaaatcagcctggtgcggtggcacacccattagtcctagctactcaggaggctgaagcataagaattgtgtgaacccaggaggcggaggttgcagtgagccaagattgggcccctccattccagcctgagagacacagcaacactcttgtcttgataaataaataaataaataaataactgtccaggtgtggtggtacagccctgtagtcggagctaatcaagaggctgaggtgggaggatcgcttgagcccaggatatggaggctgcggtgagctatgatctcaccactgcactccagcttaggggacagggcaagtctgtctcaaaaaaaaaaaaaaaagcaattgaatacactgatattttgccaggaccctgccttctacaggcatctagtctaatgggactgggagtaatcaggggagatgacctaatcccaatgtcacattataataggatgtaactggagagctacgggcatgcagaagttggaagacgagggaaggcatcacagaggctgtggggtgaaccgacttcaaggaatgggtccttcccttcagaaccacatgtgtgcgggacacccagacagaaaacacaaatgcaaagtcaagtggagggcatttggaaggagcagtgaagccaagccaggaaacaccaagatggcgagccagtgtggttgtagagattgtagagagggtggaattggcactgtggaccctggcctcgatagagaaagacatcagctaaggaagttgttcaggtgggcagtgaggttgtcgtgctttggaaagatgttcaggctgcactaggaagccccctggcttggggagagactccaggaaaccccagcagggagcatttgacagtggattcgagtgatgcaagggggacctggactgtgacctctgtcacgggaacccggaggaggctgatggcttttgcggttgatgtgggaaggagagagaacaaccggaaacgtctgcttgctgggggaagtgtcatgtccgctcctccgctccttttcttctccccttaggagcggttcatggttccttttgttttttgttctttttttttttttttttttgagactataatcctgtcttttttgtacacagagtaaagaggacaaataggtgaaagaataaatgaaaggctggaatcccacttcccccgctgtcccagggcattggatattgacggataggaggcagcaaaccactcacagagccaggaagaaatgaatgcgttggtattgccaggaggggaggccggcccggctgaaatacgctatgaccatagccaggagatactgatggagagaaaggaacacagagagggagaggtcacatcttgggagaggaagattgtggatatagtggaatgggggtctggggaggggttgcccatcagagaagggacctcagtgttggggtgactgtgctcatgtggaaattgcggggtggaggggtattcgaaggtcggatgcaaatccgagaagccggaggaagggtttttggtgatgctcccaggatggtgggctccgatgggatctttggagggggtgtgtctaggtcggctggtgtcaggagggtcttttgtgtgccaggcagagaactgtcccaaggagctgagagtagagggcccaggagcttcagggctgcagccagactgtggcccagggctcagatcccaaaggacccataggagaggcaggggccactcattcactctgcaagagaccagcagaatcctgacggagatgctgacaaatcataaaaagacaaagaatagccgggagtggcagctcaagcctgtgatcccagtactttttgagaggtggagacaggaggatcatgtgagcccaacagttggagaacaacctgggcaacacagcgagaccctgtttctaagaagatttcaaaaattagttgagcatggtagcatgtgcctagtcccagctcctcaggaggctaaggaaagaggattgcttgagcccaggaattagagtgagctatgatcatgccactgtactccatcctggggagcagagctggactctgtctcagaaaaaaaaatgtgtgggtgccaagactcaagaccatgggagctggtcagacacagtgctgacgtctgtaatctcagcactttgggaggccaaggcgggtggatcacctgaggtcaggtgttcgggaccaatctggccaacatggcaaaaccccgtctctactaaaaacacaaaaattagccaggcgtggtggttcatgtttgtaatcccagctgcttggaggctgaggtgggagaatcgcttgaacccaggaggcatcagctgcagtgagtcaagatcgagacactgccctccagcctgggcagcagagcaagactgtgtctcacaaaaaaaaacaaaaacaaaaacaaaaaaaaactgtaggagcatctggtgggaggtggtggacggagaactgtgggtttggaagctgcgccctccccctggccgtgcgttagaacaggaacacagttacatagagaacaaccttaccttgtccgacaccctcagatctttgtcccaggccaggagtcttttaatgacaggatcctctgtgattagagagcagatgtcagtgtgagaagcaggacagggtttccgtgagagcagcagggcagcgaggagaagtgtgcctcccgggggaaagtctcaggattgtggccgcgggtgaggtggatgagagaggggagaatgactttcactgggcaagggagagaggctcctgctctgagactcccctgagaagaggccgaaggaggccctgggtgtgagaatctacaggatgtagagctgggaatcagccaggaccccctccagcagacacggagggaccactgcagagtcataaaggaattcccatcatttcctcatgagacagtcacacatcagggtgtgaccatggccttgggatcccccactatggatggagacacttaggtttagcaaagtcagtaagaaacattaagtttcagagggcacagctgaaaccacttttttgatttttgattttgtttttctttatttgatttttatttttatttatttattaatttattttgagacagagtcttgctctgtgggccaggctggaatgcattggcctgatcttggctcactgcaacctctgcctcctgggtttaagcagttctcctgtctcagcctcccgagtagctggaactacagggatgagctactgtgcccagccttggtttttcttttgacgcagagttttgctctgtcacccaggctggagtgcagtggtgcagtcatagctcactgcagcctcaaagtcctgagttcaagcaatcctcttgcctcagcctcccaacgtgctgggatctcaggcgggagccacagcgcctggcccaaaaccaagctttcttatcccaagcaccgacctttatcaagtctacctaatcctctgttgtctccttaagtgtccctcatgagtgatcacttcagagtcctcccgcatggagagctcacccactggggcatatttttcccattggaaaagtgtggttattggaagtttcctctttagaaagaacaggattggaggtgctctctggggtgtcctcctaccaagcagcctgttgaaggcctcgtagtactcagggagcacgagcgacactcgccgtcgcttcgccttcatcttgaggccacacagcgtctccgccacccaggtctcctcaggctcaggggcgagctccttctctggctcatcatcagattcatccaaacattccctcttccttttccagccaagggacctacgtggggggctgggatctaccccaggggctgagtaaagaaaccaggccaccgtgtaatgcttctgcaactgatcacgttagaccccgaccccaaaccccaaaccactctccatcctccccagcctcgcagactgctggcttctccaagccacctttctgactttctcctctgctcaaccccatgtgccactccttcccctccccattcttccctctctctgtcctcagaacactgcctcatatccttccctggtccctggctctctgagtccctcttttttttttttttttttgtttcgagacagaatcttgctttgtcacccaggctggagtgtagtggtgcaatctcagctcactgcaacatgcatctcccggattccagttattctcctgcctcagcctctcaggtagctgggattacaggtgcctgccataatgcccagctccattttgtacttttaatagagacagggtttcaccatgttggccaggctggtctcaaacccctggcctcaagtgatccgcctgccttggcttcccaaagtgctgggattacaagtgtgagccactgcacccagcctgaatttctccattcttcccacacaccctccccaggttctccttcctgacctctgacccttcttttttttcttcttttttttttttttttttttttttttttttttttgagatagcatctcactctgtcacccagactggagtgcagtagcacgatctcggctcactgcaacctcttcctcccaggctcaagtgattctcctgtcttagcctcccaagtagctgggattataggcacacaccactaccacctggctaatttttgtacttttagtagagatggggtttcaccatgttggccaggctggtcttgaactcctgacctcaggtgatctgcccgcctcagcctcccaaagtgttggggttacaggggtgagccaccacgcctggcccccttccttcatcttagtcaatcctatgccacctcttcttcctccagtcccctcacctgatggtcccgacacttcatcatccaccacctcctggagggggtaccctgaggtgctccgctgggggctccgctcttcctggggctgcggttgatggctcatcatgatctttcccaaaatctgtcccatctcaccaaacctagtctctgttctgtccttggtcttcttctggacactgctgggatccagaagagtgtgttatcaattctcgaggctgggagaagtcaggagtggagaacagctctgagaagttactgttgtccaactgaactcccaggtgccgacagagtccggtccctccaatcaggaaggtcggaatctctgatgtcatcgctcatgccaacctggcaaccagtttgaaaaaaaacacatgtaactgccaggctgatctcttgtcctggagatcctgggtgaatggtatctcctgccactgtcccaacctcagaccactgtccaaaagcatcttcagggtctccgcatccctctgttccctgtcccagcagaggctgtgtcctctccactcaaagcttgaagcgtgttggggtctcctcttctctgtacatgcccgtttcagagtccagtctggtgggagagggatcaggatgggaaagaaaagtagggtaagcagaaacgatgaaaccttacaagagtgagattatcatgtacaagagatcccaggaacattgacttgatgaaaaagtcacatcagagcactcaatttggcagaggttttctgccgagtgtctactgacattcactgtccgagattctgtactgggggtacacgcgtcctctgccctaaggcatctttgagtccaagagatattttgaggactggaaatcataggaaactgcccatgagttcacacatatttccaatggtgtccccaatttcagggagtccacggatcacctaaagccagcccctccagtttggctaagaaactctatatatcaagttttgtatcatatgtattgctcttaactcagaaaattccaccatttatagcagtggtttatttatttataccattgaaggaaatggtttatttatgaatctatattatggatattctataagatactgggtgtacaaaaagactaagtcgaaaaatctcagctgtgcacagtggctcatgcttgtaatcccatctctttgggtggccaagggaggaagactgcctgaggccagcagttcaagaccagtataggcaacatagcaagagcccatctctaaaacaaaacaaaacaaaacaaaacaaaattagccaggtgtcgtggctggcacctgtgttccaacaacttgagagactgaggtggcaggaggattgcttgagcctaggagttaggggctgcagtgagctgtgatcgtgacaccgcactccagtctgggcaacacagcaagaccttgtgtcaaaaaaatttttttaattaaatataaaagagtttcatgacattcagagaccatccaaagaacctgtgggttccggccaggcacagtggctcacgcctgtaatcccagcgctttgggaggccatagcaggtggatcgcttgaggtcaggagtttaagagcagcctggccaacatggtgaaaccccatctcttctaaaaatacaaaaaattagtcaggcatggtggtgggtgcctgtaatcccagccactcaggaggcggggacagcagaatggcttaaacttgggaggcggaggttgcagtgagccaaggtcacaccattgcactccagcctgggcaacaagagcaaaactacatctcaaaaaaaaaaaaaaaacaaaaaaaacaaaaagaacctgtggatgagttcccacatggcttcctaacgggctgcggctctcctaggagtctctcgctcatgggaaaggcacaaactgaatgcggaaggaaatcccattgctgtggaagtcccattgttaggaagctctgcttttctggagttcaaatttgcattcatgacgctttaaaccgtcagagctgggtgtgtcctcctacaacaaatcactttactctctctcctggttaacaggctttcaaatattagaacatccatgttctgacctcattaaaattgctcttttgtggaatgaaaagctctgatttaacccgtctttaagcctggtatgcatattcctctctgttccggccaccttgtctagacacactacactgaggcagtgcccatcttagatgatgttgatacattgtcaaaaaatgggcaaaccaggtgcggcggctcacacttgtaatcccagcacttttggaagctgatgccgacagataaccagaggtgaggaggttgagatcagcctggccaacatggtgaaacctgtctgtttttctgtaaaaatacagaaacaatgagctgggcgtgggagtgcacttctgtaatcccagctacttgtggggctgaggcaggagaatcacttgaaccgggaaggtggaggttccagtgagccgagatcacgacactacactccagcctgggcgacagagtgagactccgactcaaaaaaaaaaaaaaaaaaagtgccagacagcccaggtttggtctgatatgttcagaaaaaagcaaaacagtcacctctcaccttttcttttcctgcaatgatgccgtttaatacaacaatggctgtaggtctgcggcagaaatatcattcaagtgaaacagaagggctttcctggctggacacagtggtcactcctgcaatcccaacactttggttggctaaggtgggaggatttcttgcggccaggagttcgaggctgcagtgagctgtgatccaccactgcattccaggctgggcatcagagtgaggcctgtctctaaaaaaacccttcactccccaaaaaaagggattttcaaataccagcctttcagcatgaggatcacatggaggaacattaagacacagatgctgggacccagccctattgattgtaattaaaaaactgaggtgaggcctgatttagctccatcattggaatccattcagatttgaaattctctgagttggacagtgcaagagagatcctaaagaaagcaaagtcactgtggactgaaatgagctggcaaggttttctgagcgtggtgaaatatgatctgggcctcgcttgggagggctgtggccaggccttgagtccgtggctcagtgggaccttctgaaacagcctccaa

SEQ ID NO: 1717 - DNA, 30724 bp, Homo sapiens
gggattataggcacacaccactaccgcctggctaatttttgtacttttagtagagatggggtttcaccatgttggccaggctggtcttgaactcctgacctcaggtgatctgcccgcctcagcctcccaaagtgttggggttacaggggtgagccaccacgcctggcccccttccttcatcttagtcaatcctatgccacctcttcttcctccagtcccctcacctgatggtcccgacacttcatcatccaccacctcctggagggggtaccctgaggtgctccgctgggggctccgctcttcctggggctgcggttgatggctcatcatgatctttcccaaaatctgtcccatctcaccaaacctagtctctgttctgtccttggtcttcttctggacactgctgggatccagaagagtgtgttatcaattctcgaggctgggagaagtcaggagtggagaacagctctgagaagttactgttgtccaactgaactcccaggtgccgacagagtccggtccctccaatcaggaaggtcggaatctctgatgtcatcgctcatgccaacctggcaaccagtttgaaaaaaaacacatgtaactgccaggctgatctcttgtcctggagatcctgggtgaatggtatctcctgccactgtcccaacctcagaccactgtccaaaagcatcttcagggtctccgcatccctctgttccctgtcccagcagaggctgtgtcctctccactcaaagcttgaagcgtgttggggtctcctcttctctgtacatgcccgtttcagagtccagtctggtgggagagggatcaggatgggaaagaaaagtagggtaagcagaaacgatgaaaccttacaagagtgagattatcatgtacaagagatcccaggaacattgacttgatgaaaaagtcacatcagagcactcaatttggcagaggttttctgccgagtgtctactgacattcactgtccgagattctgtactgggggtacacgcgtcctctgccctaaggcatctttgagtccaagagatattttgaggactggaaatcataggaaactgcccatgagttcacacatatttccaatggtgtccccaatttcagggagtccacggatcacctaaagccagcccctccagtttggctaagaaactctatatatcaagttttgtatcatatgtattgctcttaactcagaaaattccaccatttatagcagtggtttatttatttataccattgaaggaaatggtttatttatgaatctatattatggatattctataagatactgggtgtacaaaaagactaagtcgaaaaatctcagctgtgcacagtggctcatgcttgtaatcccatctctttgggtggccaagggaggaagactgcctgaggccagcagttcaagaccagtataggcaacatagcaagagcccatctctaaaacaaaacaaaacaaaacaaaacaaaattagccaggtgtcgtggctggcacctgtgttccaacaacttgagagactgaggtggcaggaggattgcttgagcctaggagttaggggctgcagtgagctgtgatcgtgacaccgcactccagtctgggcaacacagcaagaccttgtgtcaaaaaaatttttttaattaaatataaaagagtttcatgacattcagagaccatccaaagaacctgtgggttccggccaggcacagtggctcacgcctgtaatcccagcgctttgggaggccatagcaggtggatcgcttgaggtcaggagtttaagagcagcctggccaacatggtgaaaccccatctcttctaaaaatacaaaaaattagtcaggcatggtggtgggtgcctgtaatcccagccactcaggaggcggggacagcagaatggcttaaacttgggaggcggaggttgcagtgagccaaggtcacaccattgcactccagcctgggcaacaagagcaaaactacatctcaaaaaaaaaaaaaaaacaaaaaaaacaaaaagaacctgtggatgagttcccacatggcttcctaacgggctgcggctctcctaggagtctctcgctcatgggaaaggcacaaactgaatgcggaaggaaatcccattgctgtggaagtcccattgttaggaagctctgcttttctggagttcaaatttgcattcatgacgctttaaaccgtcagagctgggtgtgtcctcctacaacaaatcactttactctctctcctggttaacaggctttcaaatattagaacatccatgttctgacctcattaaaattgctcttttgtggaatgaaaagctctgatttaacccgtctttaagcctggtatgcatattcctctctgttccggccaccttgtctagacacactacactgaggcagtgcccatcttagatgatgttgatacattgtcaaaaaatgggcaaaccaggtgcggcggctcacacttgtaatcccagcacttttggaagctgatgccgacagataaccagaggtgaggaggttgagatcagcctggccaacatggtgaaacctgtctgtttttctgtaaaaatacagaaacaatgagctgggcgtgggagtgcacttctgtaatcccagctacttgtggggctgaggcaggagaatcacttgaaccgggaaggtggaggttccagtgagccgagatcacgacactacactccagcctgggcgacagagtgagactccgactcaaaaaaaaaaaaaaaaaaagtgccagacagcccaggtttggtctgatatgttcagaaaaaagcaaaacagtcacctctcaccttttcttttcctgcaatgatgccgtttaatacaacaatggctgtaggtctgcggcagaaatatcattcaagtgaaacagaagggctttcctggctggacacagtggtcactcctgcaatcccaacactttggttggctaaggtgggaggatttcttgcggccaggagttcgaggctgcagtgagctgtgatccaccactgcattccaggctgggcatcagagtgaggcctgtctctaaaaaaacccttcactccccaaaaaaagggattttcaaataccagcctttcagcatgaggatcacatggaggaacattaagacacagatgctgggacccagccctattgattgtaattaaaaaactgaggtgaggcctgatttagctccatcattggaatccattcagatttgaaattctctgagttggacagtgcaagagagatcctaaagaaagcaaagtcactgtggactgaaatgagctggcaaggttttctgagcgtggtgaaatatgatctgggcctcgcttgggagggctgtggccaggccttgagtccgtggctcagtgggaccttctgaaacagcctccaatccgtgcccccacttcatttgctagtggatgaccccctccagcggctttggtgctgatgggaataagtcaacctgcagcggaagttcagcccaagtttcagcccagcagcttctacacacctgtccgtggtctggtcatgctgccatctctgcggttctctgcggttctctgcggagtcgtggtttctgtaccttgaagagaacttcccctctgggacccagaaacccagtgaatcctcaggaaaaaagggaatgaaattactgaagacaactctgtggcggggagatggaaaagaggctctctctctttttttttcctaatattttgagacagagtttcgctcttgtcacccaggctgcagtgcagtggctccatctcggctcactgcaacctctgcctcccaggttcaagcgattctcctgcctcagcctcccgagtagctgagattacaggcacccaccaccactcccggctaatttttgtattttagggtttcgtcatgtttgccaggctggtcttgaacacctgacttcaaatgatccacccgcctctgcctctcaaagtgctgggaatacaggcataagacactgcacccggcctgtttttgttttttagagacaaggtctctgttgccttggctggggtgcagtggtacaatcagctctctgttgcctcggctggggtgcagtggtacaatcagctctctgttgcctcctgggctcaagcaatcctcttctctcagcctcccaagtagctgagactacaggtgcatgcctgtagtagatatagcatcttgctctgttgcccagactggtcttgaactcttggtcacaagcgatcctcttgccttggcctctcaaagtgctggaattacacgcgtgagccattgagcccaaccagataagatgatctttaagggcccttcccatggcaccataatccaagtcagcgagactgtggctatagcaagtttaacataaccagatacgctagtattatgggctgcatggtgtgccccccacccctaattcatgtattgaagccatgaccctccagaccttagaggtgaccttattggaaccagagtctttacagaggtgatcaagttaaaatgaggtcactagaggccaggcactgtggctcacacctgtaatcccagcacttcgggaggccgaggcaggcagataatgagcccaagagaccgagaccatgatgtccaacatggtgaaaccctgtctctactaaaaatacaaaaattagccaggcgtggtggtgtgggcctgtagtcccagctactcaggaggctgaggcaagagaatcgcttgaacccggaaggcagagattgcagtcagccaagatcatgccactacactccagcctgggtgacagagtgagactctatctcaaaaaaataaaaattaaaaaactaaaaacctacagtaccgccttttacataatgcaatggtttggtaagcacatgcaccccagggaggtagtggcagattcagtcaaccttcccagcagcgtggagacgcagtcaggcatagcaggtgttgatgtggtttgaacccacagcttggctcaaatccacactcccctacttagtaccgagtgaagccacttaccctctaagtgccttacttttcttttcttttcttttttcttttttcgagacagagtctcgctctgtcacccaggctggagtgcagtggcatgatcttggctcactgcaaacttcgccttccaggttcaagcaattctcctgcctcagccttccaagtagctgggattacaggcgcccaccaccatgccgggctaatatttgtatttttgatagagatggggtttcaccatattgcccaggctggtctcgaactcctgacctcaagtgatctgtctgcctcggcctcccaaagtactaggattagaggcatgagccaccacacctggccacttttcttatctatatttgttatgtggatgacttgtgttaacgcaaataagatgctgctcgtcatctttaaagaaaataggtggcaacctgttatagcaagtcctgtttttatttgtacttatgaggctttaattaaacgctaagaattaaaatgcacataataatagactttacctcacaaactggcttcaaatattcgatgagacttacatgtattacttaaatgaggttaaatttaaccttttaaaaatgatttattgtggctgggcacagtggctcacacctgtaatcccagcactttgggaggccaaggcagacggatcacttgaggccaggagttgaagaccagcctgaccaacacggcaaaaccccatctccgctaaaaatacaaaaattagccaggcatggtggtgcacacctgtaatcctagctactcaggaggctgagacacaagaatcgcttgaacccgggaggcagaggttgcaaggaggtgagatcacaccactgcactccagcctgggcaatagagtgaggctctgccttaaaacaaagaaaaatgattttgggggatgatggggtgtcactgtgttgaccaggcttgtctcaaactccttgcctcaagcaatccacccacctcagcctcccaagtagctggaactacaggcgcatgccaccacgcctggctaatgtgtgtgtgtgtgtgtgtgtgtgtgtgtgtgtgtgtagaaacaaggtcttactgtgttgtttaagctgctctcaaactcctgggctcaagtgatcctcccacctcggcctcccaaagcattggaattacaggtgtgagccacctcactgagccctccacctttcagctgaacgcagaaaagtacaatcttttaacccaaagcgttcctcacacttagggtcaggaagagcccttcatgccctggaggcaactactaaccctctgctaaacactctgactctgggtgtgagaaacacacctactgtgccccacatatttttccaaatacaacttaatttagccttcacgacaaccctggagtgaaggatcattaactttatttcatagatgtggaaactgagactcagaggcaggaaatgacctccttctggaggctgcaaattctttgatgctcctttgatcaacaggtgggagctggccagaggtggtggctcacacctataatcccagcactttgggaggccaaggtgggaggattgactgaggccaggagtttgaaactagcctgggcaacatagcaagacctcatctctacaaaaaatacacaaattagcagggtgtggtggtgcacacctgtagtcgcagccactcgggaggctgaagtggtagcattgcttgagcccaggaggttgaggctggagtgagccatgatcaagccactgcactccagccgaggagatggagatagaccctgtctcaaacaacaacaaaaaaataggtgaggatcagccaggcatggtggctcacgcctgtaatcctagaactttgggaggccaaggtgggaggattgcttgaggccaggacttcaagaccagcctgggcagcctagcaagatcccatcccttaaaaaaaagtttttaggctgggcatggtcactcatgcctgtaatcctagcactttgggaggccaaggcaggcgggttgcctgagctgaggagtttgagaccagcctgggcaacatggtgaaatcctgtctctactaaaatacaaaaaattagccaggtgtggtgttgggcacctgtaatcccaggtactcaggaggctgaggcaggagaattgcttgaacccaggaggcagaggttgcagtgagccgagagcgcaccactccactccagcctggacaacagagcgagactccgtctcaacaaaaaaatgtttttaattagccagctgtgatgatgcatgcccatgtcccagctacttgggaggctgaagcaggaggattgcttgagcctgggaggtcaaggctgcagtgagctatgattgcgcccctgcactccagcctggacagcggagggagaccctgtctgaaaataaaaaaagaggtgggggcctatgaccccccctttaattttggcccaaccttagtaacaggatagtcattgagtagggcaaaagtgatgttatgatgtttttcagcctccaatttacagtctaaaacatgtcttgggtaaacacagcaagactccatctcaaaaaaaaaaaaagaaaaaaaatcagaagtgaacctgtagcctgtagtgtgttgccaaataaacttatttttagagatacttctttccattttctgtgaggtcatctgcagtttcacatggtagacagacttaggtgagattcttagcaacatagaatgaagagtaaagaggtttgtttatttcacaagggtttattgaaggcctacgatgtgttaaatgctgtaggaaatacccactgatttctcttttcatggaggtttcccgccttctcttaatgagtgatcaattaaactgtttactgggaacttgctaagttaatgaacacacgggatacattctttggatgagcagacattggttgggcagaggggcaagaggagagcagtttagacagagacctgcttatacactgtagtgtctaagagagcttgtgatgttcaggaaacagttgttcactgtgctgcaatataggggacggccagttgcggtggctcacacctgtaatcctagtgctttggaaggccaaggcgggcagatcacctgaggtcaggagttagaaaccagcctggccaacatggtgaaaccccatctctactaaaaacacaaaaattagctgagtgtaatggtggatgcctataatcccagcaacttgggaggctgagacaggagaatcacttgaacttgggaggtggaggttgcagtgagccgagatcatgccattgcactctagcccaggtgacagggtgagactctgtctcaaataataataataataataataataataataataataataataataataataataatgtaggggacttgatgaagggaaaggatcagagagattctgaaaagaaggtagtttggggcccagtgatgactagattttaagtttcatatagtaggaagtggggcactagtaatttttcaagcagaaaaattatttgaccagattcgtgatttcaaaaatagctctggtgatagagtggaggatgggttggagcagggaataaggggaaatgaaaccgttataaaactcttaaagtgggctgggcatggtggctcacgcctgtaatcccagcactttgggaggctgaggcgggcggatcacgaagtcaggagatcgagaccatcctggctaaaacggtggaaccctgtctctactaaaaatacaaaaaattagctgggcatggtggtgggcgcctgtagtcccagccactcaggaggctgaggcaggagaatggtgtgaacccgggaggcagagcttgcagtgagctaagatcgtgccactgcactccagcctgggcgacagggcgacagagcaagaatccgtctcaaaaaaaaaaaaaaaaaaaaaaaaaaaacctcttaaaacaagtacagcaagaactttgagggtctttgctaagacagcagctggcagcttcaatttggagtagggtatcaaaggcaactgtgtataaggaatagttatataactggtatccaatttctgagatgattttgacttaaacattgtgtatttcccagcatactgttggtttttctaattatgtgggaaattatgttgcttttacttttttttttgctcattgcccagcctagggtgcaatgctgcaatctcagctcactgcaacctccgcctcccaggtttaagtgattcttctgcctcagcctcccaagtagctgggattacaggcgcccaccaccatgcctggctaattttttgtatttttggtagagacagggtttcacgacgttggccaggctggtctcaaactcctgatctcaagtgatccacctgcctctgtgtcccaaattgctgggattacaggcatgagccaccgcaccggccatgctttcagttttcaagaaagaagacaccattattgccaaagattttggtaatttgagagatacaatgtatgttttctccatgtggatactagatagtaaggatgtgttgaatttgaagtgtctatccagaagtattttgggtacttgtttaaggattgtaaaacaatgtttccatttctggatataataaatgtatttgttaatataataaatgaatagattagacccataaactatttgcagtgttgagtcatttcccacagttaaaatcaggatgaaaatatatagctgaatacttgctttgtttcttgtaactgatttctttagtacagaacctgctaaggccatcaaacctattgatcggaagtcagtccatcagatttgctctgggccggtggtactgagtctaagcactgcggtgaagaagatagtaggaaacagtctggatgctggtgccactaatattggtaagtttgggagagttttaagccacaagaaatgatcagtgaatgttgttgtagtcaagaaacatttgttattgaaataagactatcaagtgttgatgtagtaataaactattatttttaagttaaagttagcacctattatgtgcctagtacttagctaggtagtaataataataacgacagcttttcttgtgttcttatggtgtgccaggcaggtgttatgctaagaattgcacagaaatatctcatttaatttgcagaatagctgggcgtggtgtctgacgcctgtaatcctagccctttgagaggctgaggtggggggattgcttgaagccaagagttcaagaccaacctggccaacatggggagacctcgtctctattaaaaaataaagcaggccgggtgtggtggctcacgcctgtaatcccagcactttgggaggccaaggcgggtggatacctgaggtcaggaattcgagaccagcctgtccaaaatggtgaaactctgtctctactaaaaatacaaaaattagccagacctggtggcagaagcctgtaatcccagctactggggaggctcaggaatgagaattgtttaaatttgggaggtggaggttgcagtgaaccgagatggtgccactgcacgccagcctggggacagagcaagactctgtctcaaaaaaataaaataaaataaaataaaataaatcctggagtagtggctcacatctgtaatcccagcactttgggaggctgaggggggctgatgctttgaggtcaggagttcaagaccagcctaaccaacgtggtaaaaccctgtctctactaaaaatacaaaaattagccagatgtgatggtgcatggctgtaatctcagctcctcagaaggctgagggaggagaattgcttaaacctgggaggtggaggttgcagtgagccaagatcgattgtgccactgcattccagcctgggtgacaagagcaaaagtccatctcaaaaaattaaaaaaaaaaaaaaaaaaaggaaagaaaaaaaagaaaatgacaaaattaaaaaaaaattattaatctgccaaataactttatgagatagaacttattacctccattttacagttgaggaaattaagggacagtaaatttcctttttttgagattataaagctaataaaatagaatctaggaagtctgattccagaaccagttctgtttttttttcttttttttttttttgagatagagttttgctcttgttgccgaggctgcggtgcaatggcacgatctcaactcactgcaacctccacctcccaggttcaagcgattctcctgcctcagcctcacaagtagctgggattacaggcatgcaccaccacgcctggctaattttgtatttttagtagagatagagtttctctacgttggtcaggctggtctcgaactactgacctcaggtgatccgctcgctttggtctcccaaagtgctgggattacaggcatgaaccactgcgcccggcccccgttctccttactgggtatgttaaaattatttctttcaaaggaaaaggctggtcaaagtgcaacggtctttacaactaattgatcacaaccagttacagatttttttgttccttctccactccaactgcttcacttgactagtgtaaggaaaaaaaaaagaggaaagaaagaaaatgctaaactatttaatctgggctagtaaatggccagaaagaactttataaaaatgaaatatacaaaatgacactagtatgtttaactaaaggtatagttacgacacttaaatttgcacgttataaataatatcaatataaaaactgatagcgtgggtccatttttaataaatatataaatattttaaactttctagatctaaagcttaaggactatggaatggatctcattgaagtttcaggcaatggatgtggggtagaagaagaaaacttcgaaggcttaagtaagttaactttctaatcctattacaaaataattgggccacatgtcttagaattttgagtaacactgtcttgggaaacacaaaaacagttttttaaagccagttactagatatcatgtatatttgttgttatagcacttgagatatcttagtccttactttacagtctctttcagctctgaaacatcacacatctaagattcaagagtttgccgacctaactcgggttgaaacttttggctttcgggggaaagctctgagctcactttgtgcactgaggtgagaaaatatttttatccattcacttgaccccttagaaaaacctctctgaaaattaattggaatcattattatttacaattttctatctcaatatctcagcttctagcttctgaattctgttttgtctcactgccaatctaagtcctagtacttctgaaatgtgagcaataaatgaatgaaatgaagcaaatagtattgtttaaaaaattggttacccttattaaaacagtaacttctcaatttgaacataacatatagataataaatgatagttaccattggttttcattatcaatttttagggaaacatttcaccaaagcactatttaattacagcacagatactaaatttttataaataattacatgcacacacacatatatatacatatatatacatatatatacatatatacatatatatatacatatatatacatatatacataaatatatacatatatatacatatatacatatatacatatatacatatatatacatatatatatacatatatatacatatatatatatatatattttttttttttttttttttagacagagtcgcactctgtcacccaggctggagtgcagtggcacagtctcagctcactgcagtctctgcctcccaggttcaagtgactttcgtgactcagcctcctgaagagctgggactatagcgtgcaccaccactcctggctaatttttatatttttagtagagatggggttttgccatgttgcccaggctggtctggaactccaggcctcaagtgatctgccctccttggcctcccaaagtgctggaattacaggcacgagccaccgtaccctgccctacatatacattttaattataatatcttttggattctttaaaaaaaattttaaaaattttaaaaaattctttaaaaaaattcttttaaaaaattttgtttgaagagtaataacaaaacaaatctctatttgagaatcaataaatcttgagatcatttatggttttgcaattcaacctgaaaaatgaagtcaaagcttttatcaaaacaaagcatgtttagtgctctctgtctcactgtcttttagatgccagaccttagattttgtgatgactcctcaaccgtttagatctcggttatctcagagggatcatcagctttttaagaaaattttgagagaaaagcaagtgaagaaaagagtagtcagtgcccaacatcatggatctctcactgaacacaccatgcctggtattctctcacagtgatgtcaccatttctacctgccacgtatcggcgaaggttgggactcaactggtgtttttgatcacgatgggaaaatcatccagaaaaccccctacccccaccccagagggaccacagtcagcgtgaagcagttattttctacgctacctgtgcgccataaggaatttcaaaggaatattaagaaggtacagtaaattaatcctggttttcaagagtattggttaatgcacatgagcaaaagatttactaaagatgtttattcttcagttgattctcttcccataatttattgagaaatgctttatttgcatttctcattaaagacttaacttcaggatgatttacttttttctttttatcacataatgtttattaggactgggaaacatagtgagactctgtctctatgaaaaattaaaaaaaaaattgactgggcatggtggcatgcacctgtagttccagctacttgggaggctgaagtgggaggatcacctgagcccaggaacttgagactgcagtgagctatgattgcgtcactacacttcagactgtgagacagagtaagaccctgtctggaaaaatatatatacatatatatacattttttttattttttatttttatctttttttgagatggagtctcactttggcaccctggctgcagtgcagtggcgcgatctcagttcactgcaacctccacctgccaagttcaagcgattctcctgcttcagccttctgagtagctaccattacaggcgcgcgccaccacgcccggctaatttttgtattttcagtggagacggggttccaccatgttgtccaggctggccaggctggtcttgaattcctgccctcaggtgatccgcccacctcggcctctcaaagtgctgggattacaggcgtgagccaccatgcctgaccttatgtacttatatttttatgagaatatttctcttggttttctgataaatgagttactggaacccttatgaatttgaatgcaaatgaaacagctaaatgttatataattgttgtgtttaaaaagcagattataaaactgtctgtattatatgattacagttttataaaaacaaaacaggcctaaatgtgtatagtataaagactgaagagtcagcacttccatgttctcagcggttatccttggatgtgagatctcatgcactttttgctctcttctttgtgcctttccattttgcatgcgtatttcttataatctaaaaagttacttaaacatatgcagctaaaaactttttttacttgtaaagcgtttggtgctaattttaacttttttttttagacggagtcttctcactctgtcgcccaggctggagtgcagtggtgtgatcttggctcactgcaacctccgcctcctgggttcaagtgattctcctacctcagcctcccaagtagctgggattataggtgtgtgtcaccacacccagctaatttttgtatttttagtagagatggggtttcaccatgttggccaggctggtcttgcacccctgacctcaagtgatctgcccacctcagcctcccaaagtgctgggattacaggcgtgagccaccacgcctggctttttttttttaaagcttttttgtaagtcagccagcaagaacacaggaggaagtactcaaatctcccttacacagctgggggctgtgtcaggttttataagcatagggtaatgaggtgtgatttgattggatcttgcaataaagtaatgctgggaggtgtgatctgactggatcctgccatggggtgacaccaaaactcaatctgattggatcctggctcctgcctgggggtgtctggttcttaaatcggtccgagctcttcaggctgagctcttaggttccactccacggtggcacgcgtggttaacctgggcatgcacagggtacatgaccttcaacctgcaggtcgatggcaattggaaaacaactgacaacttcattacataaaagttgaactgattcgggtgcggtgactcacgcctgtaatcccagcactttgggaggccaaggcaggtggatcacctgaggtcgaggagttcaagaccagcctggccaaaatggtgaaaccccgtctctactaaaaatataaatattagccaggcgtggtggcgcacccttgtaatcccagctaccccagaggctgaggcagcagaatgcttgaacctaggacgtggaggttgcagtgagctgagatcgtgccattgcactccagcctgggtgacaagagtgaaactccatcaaaaaaaaaaaaagttgaactagatttggtctgatgcagttacagatttacaaaccgcgtcccaccctcctgccaacaccttccactcctcattcttgagggattagggatggaggtcatgcttctgtatcgacttcatgctgaccaggggcacttagtcccctaaagtgagaggaatgaaactcttgggcttctgagttcagatgagttctggggtcacccggagtagcttgaaaggctggtattgttgtaatacaagctgaaggtggaagtgttggatcctggaggacaaacagctcaccatccatttaaataaataggaccaaaaagtaacagaacagtggccacgaggggccccaacagaggaagaaaccaggtgaggtgtggtatagtggactcgactgccttctaaatctcagtggttgtccgggtgcggtggctcacgcctgtaattccagcaaaagaagagccgaggcagggtgatcacgaggtcaggagttcaagaccagccgggcaaacatggtgaaaccccgtctctactgaaaatacaaaaattagccaggtgtggtggcgtgtgctgtagtcccagctactagggaggctgaggcaggagaattgcttgaacctgggaggcggaggttgcagtgagccgagattgtgccactgcactccagcctaggtaacagagcaggaccccatctcagtcaatcaatcaatctcagtggttgaactacccttgatatggttcagctctgtatccccaaccaaatctcatgtccaattgcaattcccagtgttgagggagggacctggtgggagatgattggctcatggcggctgacgtcccccttgctggtctcgtgatagtgagtgagcgctcatgggatctggttgtttagaagcatgcagcacctcctgcttcactctctctgtctctcctgctccaccatggccagaaacgtgcctgcttccccttcgccttctgccgtgattgtcagtttcttgagggctccccagccatgcttcctgtacagcctgcaaaactgtgagtcaattaaacctcttttcttcataaattccccagtttccagtagttctttatagcagtgtgaaaacagactaatggacccttctggttgaaggaatgtagccattctgcttgtttaagtatttcctttctattcatctctatttcccgggaggtgtttatccaagtgcaataggagatattggtgactgcagagtcccctcagtgttctgctagtaaatagttgaaggttgatcagtgatctccagcattttcagtctggcatggaaaagcccccatgtaactggtaaaggtatcagtaagcaccaggaggtatctaaatccaccaggagccataggcatcatgttgatgtccatttaccagtcttccctggcaagattctctgaattgtactgccttggccaaaagaggtatgggaggggctgggcacagtggctcacgcctgtaatcccagcattttgggagaccaattcgggtagatcattagaggtcaggggttcaagaccatcctggccaacatggtgacattccatctctactaaaaatacaaaaagtcagcggggtttggtgttgggtgcctgtaatcccagctactcgggaggctgaggcaggataatcacttgaacctgggaggaggaggaggtggcagtgagctgagatctcgccattgcactccagcctgggcaacaagagcgaaacttcatctcaaaaaataaaaaaagaagtctgggtgtggtggctcgtgcctgtaatcccaggactttgggaggccaagatgggtggatcatgaggtcaggagttcaagaccagcctggcctagatggtgaaaccctgtctcgagtgaaaatacaaatattagctgggcatggtggcacacacctgtaatctcagctactcagaagtctgagacagaagaattgccaaaacccgggagggagaggttgcagtgagccgagatcgcgccactgcactctagcctgggcgacagagcaagactccgtctcgaaagaaagaaagagaaaggaaattccccagggaagtacctcggcttatttcatgaagaggtactgaaggaagcagaggcatgtggaggacttccccacctcgtgcagctatttgggccgtggcgtctgaaatttcttatttcagagtcacccctttgatgaccttggcagtggactgcagtcatctgtttaggcctctccatggcccgtgtcaatgccgatatttctgtctgttgcacatttgatttccttgttgttggcatttagaaggccccctgtttcccagatcacaccacgggcatggaccgcagagattgcatcttgtgagtctgtagaaacagtcaaggccttgtcctctcttaggtccagagctcaggtgaatgcagattttcccggccatctgtgctgaagtccctgtggggaggctcctggctggtttcctgtaggtagacagctacacatcctgcccttcattggcttcttttcatgaagctcctgctgtctacaaaacatgtctcccttttcttcttgaaccacatctctgttattgaaactctagaagtcagccaggcacagtggctatgcctgtaatcccagcactttgggaggccaaggtgggtggatcacctgaggtcaggagttcaagaccagcctggccaacatggcgaaaccctgtctctaatacaaatactaaaattagccaagcatggtggccactgcactccagcctgggtgacagagcaagactctgtctcaaataaagaaagagaaagtatcatgcttttcagagttctgtgggttgttatggtgaattatcaaacctgaggacgtggtgggaacctccaaatttgcagccagttggtgagaagtacatgcggtctgtggacacccaagcttgcagctgcatctgaagcgagggcagcctagcgggggctggtggccttaacctgtggcatttgatgtaacatcagggagttgacatcagaattacgtcacacaggccaggtgcagtggctcatgcttataatcccagcaattagaaaggcaagataagaagattgcttgagcttgagtctgagcccacagtgagctatgaccgcaccactgcaccccagtctgggtgacagcacaagaccccgactccaaaaataaaaaagaaaaatcacaaagaattgcatggcagagtgcctgtctttcacagcttgaactgttgcaggaactttctttttttttttttcttttgtgatggagtctcgcgctttcacccaggctggagtgcagtggcgcgatctctgctcactgcaggctccgcctcctgggttcacaccattctcctgcctcagcctccggagtagctgggactacaggcgcctgccaccgcgcccagctaattttttgtatttttagcagagatggggtttcaccgtattagccaggatggtcttgatctcctgacctcatgatccacccacctcagcctcccaaagtgctgggattacagtcctgagccaccgcgcctggacttttttttttttttttgagaggggttggggagacatattctctgctagtgattctcctgcctggtctcgaactcctgctgggatcacaggcgtgagccaccatgcccagccacctttagagttttcttaccacctggttttcctctctcaatatctttctctcatttcctgctttaaaactctagcttggggtctgggcacagtagctcatgcctataatcccagcactttgggagactgaggcgggtggatcacttgaggtcaggagtttgagaccagcctggccaacatggtgaaaccttgtctctactatttttacaaaagttagtcagacgtacaggcggatgcctgtagtcccagctacttgggaggctgaggcaggagaatttgcttgaacgcggaggtgaaagttgcagggagccgaggttgtgccactgcactccagcctgggagacagagcgagactgtctccaaaacaaacaaacaaacaaacaaacaaaaaaaccctgtagcttgggatcagccttctcttctgttgtttttctttaaaaaataaaaattaaaaataggcttcaagtgatcctcccgccatgacctccaaaactgctgggattgtaggtgtgagcactgcacccagccgtatgtttttttctacataaaaaacagcacaggattatcttccaaagctaacaaatatgttcaaataaccacaaccccattaaggaaaaatgtcacttgacagcaaataatcaatccagaccacaatatgatcacactcactgtgaaggtgagaaaagttcatctttattatgtttccccaagagatgcactgcactgttctcttgaaaacacacagctcatgtcctcctttagaacacacatcctctttaaagtaacatacaaacatgccaaaacaagataaaaaattccatctgaattctcacatttcaaacatacactaaatatcaaataaaaatttatttttacaagaatttaggggaactaccacatagctataaatgtaatatatatgttaactaagtatcatagataaaaaccatgctcccttcagcagcacgtgtaataatagatacaaagattgaaaggtaaaagatttaggatgaaaagaatcctctcttaaaaaggaaaacaaaattatatgtatgtgtatacaacagttataatacccatcacacagctttatagaaacagcatctattcaaaaataccagtatttccaaaatatttaaaataatatttaaagtaataataatatttaaataaataaatatatttaataaatatttcagtaaataaaatatttaaataattctatacccatgtttttcaaaataaaccaataaaatagatagtatatattagacgtgttagtatatatatctgagacatgttaaaaatcacaactgaattctcacaagtcagtcacaaacctaaacagcaaataaaaatttctatcaccagaattatgtttttttctggtggggaactaccaatagctataaatagaagagattattatggaagtatcatagataaaaagagtgctcgcttcaggagcacatataataatacagaaaaaaatttaaagataataaaagatttaggataaaaagaattctcacttaaaaatgaaaagaaaattatctttaggtatatataacaactataactctcatcaaaaaactctacaggaacagcatgttttcaaaagtacaacaatttccaaactatttgaaataaacctattaataattcaatggccaacattttccaaacaaaccaataaaatgcatagtgtgcatgaagctatctgttacagtctgtggcactcatatttcacaaagaattctgtgccaatctgagcccctgcactgtgccttcaaatgctcctggactgtggcaaccaagtccataagaaacaggacctccaggttccgccccagggaggttggcattcagcaatataaaaagggaggtggtgccgcaggaaagggtggaactggaaacactcctggtttcttacttttctccaaggactcctagaagtaccccaccccacccctgctccttggaggacaacgtgatcactgtattcagctctgtcaagaatggtccaggttcttctagatgatctgcacaaatggttcctctcctccttcctgatgtctgccattagcattggaataaagttcctgctgaaaatccacatctcccctgggtccggtgttctggaagtgagagagacaatgtcacacttcaaggaggcagctctctagacaggaaggttattcacgtcccatgtcaagtctagctagagttcagagcaattgagaagtgcaattttatctcctgcctttcattctataccctgcttctgaaccatcgtgttcaactgtgaaactcacactttggtgaccctgactccaaaacttaatacacccaaggtcagccccagtgatctgcttcatagccaggactttgggtgggtcttcccagggagtagggcaccctcagagaatgtggctttggacttcatcacagctggggccttttgtgtcacttcagatctaaacttgtaaccgtgctagatctgtttctaacgtgacaacatcacgaaccacgagtccagaagcctaatccataatcctccctcctcatgacgaagtctcatgctctgtgctcaacatggttagctgcacaagatgtaaaccaaagcttcactgaaccctcgacccaaatcggtaactcaagtgcatcaatcataatgaacctccccgaactcagtatttatgattatttttgaggcagggtctcactctgtcgcccgggctggagtgcagtggcaggatcagggctccctgcagccccgacctcccaggctccagcgatcctcccgcctcagcctcctgagtagttgggagtagagatgcctcccacatcgcctggctaatttttgtatttttgtggagaggggatctcgccacgttgcccaggcttgaagccagatcaagcaattgggttccttggatttccgaaatagaccccaatattctgcctttaccccggaggatgcagatgtaccttctctcaggccgatgacctcaggcctccacggtccctggagctctaggaaaggtgggcgcgatctcgcgcccacacccagtgctctgggtcataagcctggatctggaaaaacaaacgcgctttgagaagacggggactccccaggatacccctctctcccctcgtccagcctccagcccacccgattcctccccacatcctccacgtccccaggccccacccacctcttccaactcctccagggaaacccaagccctgcagcgcatggaacaaaagaagtggaaccgatacttccggaacaaggctatctgagagcagttcttcctggccctcgggttcatgtaacggcataactggaaccaaagctcactgagcaagggtatatgagagcgggtctcctcgtacaggaagtagaagatgttttgtttgggggcctcgtcgtcctcctccatgtcattggccagatagctgaggacagaaatcaggttgctgctcaggggcaccaccaggagagacctccggctgaggtcagcttctcagagaggaaggtaagggaccgtccctagctcaggactggcacccaccctgcagagagccacgccttcctcaggagggctctgctggacagagacctgatcaagggcgtctcccactccttcaggatggagacaaaaacccaactggtgaccaagagtggtggcttatgcctggaatcccagcacactgggaggccgaagcaggaggatcacttgaggccaggagtttgagacaggcctgggcaacatagcaagaccctcgtctctattaaaaatataaaaaatacgccagacgtggtggctcatgcctgtaatcccagcgctttggaaggctgaagcaggtggattgcttgagaccaggagtttgagaccagcctggtcaacacagagaaaccccatctatactaaaaatacaaaaatcagcctggtgcggtggcacacccattagtcctagctactcaggaggctgaagcataagaattgtgtgaacccaggaggcggaggttgcagtgagccaagattgggcccctccattccagcctgagagacacagcaacactcttgtcttgataaataaataaataaataaataactgtccaggtgtggtggtacagccctgtagtcggagctaatcaagaggctgaggtgggaggatcgcttgagcccaggatatggaggctgcggtgagctatgatctcaccactgcactccagcttaggggacagggcaagtctgtctcaaaaaaaaaaaaaaaagcaattgaatacactgatattttgccaggaccctgccttctacaggcatctagtctaatgggactgggagtaatcaggggagatgacctaatcccaatgtcacattataataggatgtaactggagagctacgggcatgcagaagttggaagacgagggaaggcatcacagaggctgtggggtgaaccgacttcaaggaatgggtccttcccttcagaaccacatgtgtgtgggacacccagacagaaaacacaaatgcaaagtcaagtggagggcatttggaaggagcagtgaagccaagccaggaaacaccaagatggcgagccagtgtggttgtagagattgtagagagggtggaattggcactgtggaccctggcctcgatagagaaagacatcagctaaggaagttgttcaggtgggcagtgaggttgtcgtgctttggaaagatgttcaggctgcactaggaagccccctggcttggggagagactccaggaaaccccagcagggagcatttgacagtggattcgagtgatgcaagggggacctggactgtgacctctgtcacgggaacccggaggaggctgatggcttttgcggttgatgtgggaaggagagagaacaaccggaaacgtctgcttgctgggggaagtgtcatgtccgctcctccgctccttttcttctccccttaggagcggttcatggttccttttgttttttgttcttttttttttttttttttgagactataatcctgtcttttttgtacacagagtaaagaggacaaataggtgaaagaataaatgaaaggctggaatcccacttcccccgctgtcccagggcattggatattgatggataggaggcagcaaaccactcacagagccaggaagaaatgaatgcgttggtattgccaggaggggaggccggcccggctgaaatacgctatgaccatagccaggagatactgatggagagaaaggaacacagagagggagaggtcacatcttgggagaggaagattgtggatatagtggaatgggggtctggggaggggttgcccatcagagaagggacctcagtgttggggtgactgtgctcatgtggaaattgcggggtggaggggtattcgaaggtcggatgcaaatccgagaagccggaggaagggtttttggtgatgctcccaggatggtgggctccgatgggatctttggagggggtgtgtctaggtcggctggtgtcaggagggtcttttgtgtgccaggcagagaactgtcccaaggagctgagagtagagggcccaggagcttcagggctgcagccagactgtggcccagggctcagatcccaaaggacccataggagaggcaggggccactcattcactctgcaagagaccagcagaatcctgacggagatgctgacaaatcataaaaagacaaagaatagccgggagtggcagctcaagcctgtgatcccagtactttttgagaggtggagacaggaggatcatgtgagcccaacagttggagaacaacctgggcaacacagcgagaccctgtttctaagaagatttcaaaaattagttgagcatggtagcatgtgcctagtcccagctcctcaggaggctaaggaaagaggattgcttgagcccaggaattagagtgagctatgatcatgccactgtactccatcctggggagcagagctggactctgtctcagaaaaaaaaatgtgtgggtgccaagactcaagaccatgggagctggtcagacacagtgctgacgtctgtaatctcagcactttgggaggccaaggcgggtggatcacctgaggtcaggtgttcgggaccaatctggccaacatggcaaaaccccgtctctactaaaaacacaaaaattagccaggcgtggtggttcatgtttgtaatcccagctgcttggaggctgaggtgggagaatcgcttgaacccaggaggcatcagctgcagtgagtcaagatcgagacactgccctccagcctgggcagcagagcaagactgtgtctcacaaaaaaaaacaaaaacaaaaacaaaaaaaaactgtaggagcatctggtgggaggtggtggacggagaactgtgggtttggaagctgcgccctccccctggccgtgcgttagaacaggaacacagttacatagagaacaaccttaccttgtccgacaccctcagatctttgtcccaggccaggagtcttttaatgacaggatcctctgtgattagagagcagatgtcagtgtgagaagcaggacagggtttccgtgagagcagcagggcagcgaggagaagtgtgcctcccgggggaaagtctcaggattgtggccgcgggtgaggtggatgagagaggggagaatgactttcactgggcaagggagagaggctcctgctctgagactcccctgagaagaggccgaaggaggccctgggtgtgagaatctacaggatgtagagctgggaatcagccaggaccccctccagcagacacggagggaccactgcagagtcataaaggaattcccatcatttcctcatgagacagtcacacatcagggtgtgaccatggccttgggatcccccactatggatggagacacttaggtttagcaaagtcagtaagaaacattaagtttcagagggcacagctgaaaccacttttttgatttttgattttgtttttctttatttgatttttatttttatttatttattaatttattttgagacagagtcttgctctgtgggccaggctggaatgcattggcctgatcttggctcactgcaacctctgcctcctgggtttaagcagttctcctgtctcagcctcccgagtagctggaactacagggatgagctactgtgcccagccttggtttttcttttgacgcagagttttgctctgtcacccaggctggagtgcagtggtgcagtcatagctcactgcagcctcaaagtcctgagttcaagcaatcctcttgcctcagcctcccaacgtgctgggatctcaggcgggagccacagcgcctggcccaaaaccaagctttcttatcccaagcaccgacctttatcaagtctacctaatcctctgttgtctccttaagtgtccctcatgagtgatcacttcagagtcctcccgcatggagagctcacccactggggcatatttttcccattggaaaagtgtggttattggaagtttcctctttagaaagaacaggattggaggtgctctctggggtgtcctcctaccaagcagcctgttgaaggcctcgtagtactcagggagcacgagcgacactcgccgtcgcttcgccttcatcttgaggccacacagcgtctccgccacccaggtctcctcaggctcaggggcgagctccttctctggctcatcatcagattcatccaaacattctctcttccttttccagccaagggacctacgtggggggctgggatctacccccaggggctgagtaaagaaaccaggccaccgtgtaatgcttctgcaactgatcacgttagaccccgaccccaaaccccaaaccactctccatcctccccagcctcgcagactgctggcttctccaagccacctttctgactttctcctctgctcaaccccatgtgccactccttcccctccccattcttccctctctctgtcctcagaacactgcctcatatccttccctggtccctggctctctgagtccctctttttttttttttttttttgtttcgagacagaatcttgctttgtcacccaggctggagtgtagtggtgcaatctcagctcactgcaacatgcatctcccggattccagttattctcctgcctcagcctctcaggtagctgggattacaggtgcctgccataatgcccagctccattttgtacttttaatagagacagggtttcaccatgttggccaggctggtctcaaacccctggcctcaagtgatccgcctgccttggcttcccaaagtgctgggattacaagtgtgagccactgcacccagcctgaatttctccattcttcccacacaccctccccaggttctccttcctgacctctgacccttcttttttttcttcttttttttttttttttttttttttttttttttttgagatagcatctcactctgtcacccagactggagtgcagtagcacgatctcggctcactgcaacctcttcctcccaggctcaagtgattctcctgtcttagcctcccaagtagctgggattataggcacacaccactaccgcctggctaatttttgtacttttagtagagatggggtttcaccatgttggccaggctggtcttgaactcctgacctcaggtgatctgcccgcctcagcctcccaaagtgttggggttacaggggtgagccaccacgcctggcccccttccttcatcttagtcaatcctatgccacctcttcttcctccagtcccctcacctgatggtcccgacacttcatcatccaccacctcctggagggggtaccctgaggtgctccgctgggggctccgctcttcctggggctgcggttgatggctcatcatgatctttcccaaaatctgtcccatctcaccaaacctagtctctgttctgtccttggtcttcttctggacactgctgggatccagaagagtgtgttatcaattctcgaggctgggagaagtcaggagtggagaacagctctgagaagttactgttgtccaactgaactcccaggtgccgacagagtccggtccctccaatcaggaaggtcggaatctctgatgtcatcgctcatgccaacctggcaaccagtttgaaaaaaaacacatgtaactgccaggctgatctcttgtcctggagatcctgggtgaatggtatctcctgccactgtcccaacctcagaccactgtccaaaagcatcttcagggtctccgcatccctctgttccctgtcccagcagaggctgtgtcctctccactcaaagcttgaagcgtgttggggtctcctcttctctgtacatgcccgtttcagagtccagtctggtgggagagggatcaggatgggaaagaaaagtagggtaagcagaaacgatgaaaccttacaagagtgagattatcatgtacaagagatcccaggaacattgacttgatgaaaaagtcacatcagagcactcaatttggcagaggttttctgccgagtgtctactgacattcactgtccgagattctgtactgggggtacacgcgtcctctgccctaaggcatctttgagtccaagagatattttgaggactggaaatcataggaaactgcccatgagttcacacatatttccaatggtgtccccaatttcagggagtccacggatcacctaaagccagcccctccagtttggctaagaaactctatatatcaagttttgtatcatatgtattgctcttaactcagaaaattccaccatttatagcagtggtttatttatttataccattgaaggaaatggtttatttatgaatctatattatggatattctataagatactgggtgtacaaaaagactaagtcgaaaaatctcagctgtgcacagtggctcatgcttgtaatcccatctctttgggtggccaagggaggaagactgcctgaggccagcagttcaagaccagtataggcaacatagcaagagcccatctctaaaacaaaacaaaacaaaacaaaacaaaattagccaggtgtcgtggctggcacctgtgttccaacaacttgagagactgaggtggcaggaggattgcttgagcctaggagttaggggctgcagtgagctgtgatcgtgacaccgcactccagtctgggcaacacagcaagaccttgtgtcaaaaaaatttttttaattaaatataaaagagtttcatgacattcagagaccatccaaagaacctgtgggttccggccaggcacagtggctcacgcctgtaatcccagcgctttgggaggccatagcaggtggatcgcttgaggtcaggagtttaagagcagcctggccaacatggtgaaaccccatctcttctaaaaatacaaaaaattagtcaggcatggtggtgggtgcctgtaatcccagccactcaggaggcggggacagcagaatggcttaaacttgggaggcggaggttgcagtgagccaaggtcacaccattgcactccagcctgggcaacaagagcaaaactacatctcaaaaaaaaaaaaaaaacaaaaaaaacaaaaagaacctgtggatgagttcccacatggcttcctaacgggctgcggctctcctaggagtctctcgctcatgggaaaggcacaaactgaatgcggaaggaaatcccattgctgtggaagtcccattgttaggaagctctgcttttctggagttcaaatttgcattcatgacgctttaaaccgtcagagctgggtgtgtcctcctacaacaaatcactttactctctctcctggttaacaggctttcaaatattagaacatccatgttctgacctcattaaaattgctcttttgtggaatgaaaagctctgatttaacccgtctttaagcctggtatgcatattcctctctgttccggccaccttgtctagacacactacactgaggcagtgcccatcttagatgatgttgatacattgtcaaaaaatgggcaaaccaggtgcggcggctcacacttgtaatcccagcacttttggaagctgatgccgacagataaccagaggtgaggaggttgagatcagcctggccaacatggtgaaacctgtctgtttttctgtaaaaatacagaaacaatgagctgggcgtgggagtgcacttctgtaatcccagctacttgtggggctgaggcaggagaatcacttgaaccgggaaggtggaggttccagtgagccgagatcacgacactacactccagcctgggcgacagagtgagactccgactcaaaa

SEQ ID NO: 1718 - DNA, 12247 bp, Homo sapiens
tcaagaccagcctgggcagcctagcaagatcccatcccttaaaaaaaagtttttaggctgggcatggtcactcatgcctgtaatcctagcactttgggaggccaaggcaggcgggttgcctgagctgaggagtttgagaccagcctgggcaacatggtgaaatcctgtctctactaaaatacaaaaaattagccaggtgtggtgttgggcacctataatcccaggtactcaggaggctgaggcaggagaattgcttgaacccaggaggcagaggttgcagtgagccgagagcgcgccactccactccagcctggacaacagagcgagactccgtctcaaaaaaaaaatgtttttaattagccagctgtgatgatgcatgcccatgtcccagctacttgggaggctgaagcaggaggattgcttgagcctgggaggtcaaggctgcagtgagctatgattgcgcccctgcactccagcctgggcagcggagggagaccctgtctgaaaataaaaaaagaggtgggggcctatgaccccccctttaattttggcccaaccttagtaacaggatagtcattgagtagggcaaaagtgatgttatgatgtttttcagcctccaatttacagtctaaaacatgtcttgggtaaacacagcaagactccatctcaaaaaaaaaaagaaaaagaatcagaagtgaacctgtagcctgtagtgtgttgccaaataaacttatttttagagatacttctttccattttctgtgaggtcatctgcagtttcacatggtagacagacttaggtgagattcttagcaacatagaatgaagagtaaagaggtttgtttatttcacaagggtttattgaaggcctacgatgtgttaaatgctgtaggaaatacccactgatttctcttttcatggaggtttcccgccttctcttaacgagtgatcaattaaactgtttactgggaacttgctaagttaatgaacacacgggatacattctttggatgagcagacattggttgggcagaggggcaagaggagagcagtttagacagagacctgcttatacactgtagtgtctaaaagagcttgtgatgttcaggaaacagttgttcactgtgctgcaatataggggacggccagttgcggtggctcacacctgtaatcctagtgctttggaaggccaaggcgggcagatcacctgaggtcaggagttagaaaccagcctggccaacatggtgaaaccccatctctactaaaaacacaaaaattagctgagtgtaatggtggatgcctataatcccagcaacttgggaggctgagacaggagaatcacttgaacttgggaggtggaggttgcagtgagccgagatcatgccattgcactctagcccaggtgacagggtgagactctgtctcaaataataataataataataataataataataataataataataataatgtaggggacttgatgaagggaaaggattagagagattctgaaaagaaggtagtttggggcccagtgatgactagattttaagtttcatatagtaggaagtggggcactagtaatttttcaagcagaaaaattatttgaccagattcgtgatttcaaaaatagctctggtgatagagtggaggatgggttggagcagggaataaggggaaatgaaaccgttataaaactcttaaagtgggctgggcatggtggctcacgcctgtaatcccagcactttgggaggctgaggcgggcggatcacgaagtcaggagatcgagaccatcctggctaaaacggtgaaaccctgtctctactaaaaatacaaaaaattagctgggcatggtggtgggcgcctgtagtcccagccactcaggaggctgaggcaggagaatggtgtgaacccgggaggcagagcttgcagtgagctaagattgtgccactgcactccagcctgggcgacagggcgacagagcaagaatccgtctcaaaaaaaaaaaaaaaaaaaaaaaaaaaaaaaaaaaacctcttaaaacaagtacagcaagaactttgagggtctttgctaagacagcagctggcagcttcaatttggagtagggtatcaaaggcaactgtgtataaggaatagttatataactggtatccaatttctgagatgattttgacttaaacattgtgtatttcccagcatactgttggtttttctaattatgtgggaaattatgttgcttttacttttttttttgctcattgcccagcctagggtgcaatgctgcaatctcagctcactgcaacctccgcctcccaggtttaagtgattcttctgcctcagcctcccaagtagctgggattacaggcgcccaccaccatgcctggctaattttttgtatttttggtagagacagggtttcacgacgttggccaggctggtctcaaactcctgatctcaagtgatccgcctgcctctgtgtcccaaattgctgggattacaggcatgagccaccgcaccggccatgctttcagttttcaagaaagaagacaccattattgccaaagattttggtaatttgagagatacaatgtatgttttctccatgtggatactagatagtaaggatgtgttgaatttgaagtgtctatccagaagtattttgggtacttgtttaaggattgtaaaacaatgtttccatttctggatataataaatgtatttgttaatataataaatgaatagattagacccataaactatttgcagtgttgagtcatttcccacagttaaaatcaggatgaaaatatatagctgaatacttgctttgtttcttgtaactgatttctttagtacagaacctgctaaggccatcaaacctattgatcggaagtcagtccatcagatttgctctgggcaggtggtactgagtctaagcactggatgaagaagatagtagaaaacagtctggatgctggtgccactaatgttggtaagtttgggagagttttaagccacaagaaatgatcagtgaatgttgttgtagtcaagaaacatttgttattgaaataagactatcaagtgttgatgtagtaataagttattatttttaagttaaagttagcacctattatgtgcctagtacttagctaggtagtaataataataacgacagcttttcttgtgttcttatggtgtgccaggcaggtgttatgctaagaattgcacagaaatatttaatttgcagaatagctgggcgtggtgtctgacgcctgtaatcctagccctttgagaggctgaggtggggggattgcttgaagccaagagttcaagaccaacctggccaacatggggagacctcgtctctattaaaaaataaagcaggccgggtgtggtggctcacgcctgtaatcccagcactttgggaggccaaggcgggtggatacctgaggtcaggaattcgagaccagcctgtccaaaatggtgaaactctgtctctactaaaaatacaaaaattagccagacctggtggcagaagcctgtaatcccagctactggggaggctcaggaatgagaattgtttaaatttgggaggtggaggttgcagtgaaccgagattgtgccactgcacgccagcctggggacagagcaagactctgtctcaaaaaaataaaataaaataaaataaaataaatcctggagtagtggctcacatctgtaatcccagcactttgggaggctgaggggggctgatgctttgaggtcaggagttcaagaccagcctaaccaatgtggtaaaaccctgtctctactaaaaatacaaaaattagccagatgtgatggtgcatggttgtaatctcagctcctcagaaggctgagggaggagaattgcttaaacctgggaggtggaggttgcagtgagccaagatcgattgtgccactgcattccagcctgggtgacaagagcaaaagtccatctcaaaaaattaaaaaaaaaaaaaaaaaaaggaaagaaaaaaaagaaaatgacaaaattaaaaaaaaattattaatctgccaaataactttatgagatagaacttattacctccattttacagttgaggaaattaagggacagtaaatttcctttttttgagattataaagctaataaaatagaatctaggaagtctgattccagaaccagttctgtttttttttcttttttttttttttttgagatagagttttgctcttgttgccgaggctgcggtgcaatggcacgatctcaactcactgcaacctccacctcccaggttcaagcgattctcctgcctcagcctcacaagtagctgggattacaggcatgcaccaccacgcctggctaattttgtatttttagtagagatagagtttctctacgttggtcaggctggtctcgaactactgacctcaggtgatccgctcgctttggtctcccaaagtgctgggattacaggcatgaaccactgcgcccggcccccgttctccttactgggtatgttaaaattatttctttcaaaggaaaaggctggtcaaagtgcaacggtctttacaactaattgatcacaaccagttacagatttttttgttccttctccactccaactgcttcacttgactagtgtaaggaaaaaaaaaaaaaaagaggaaagaaagaaaatgctaaactatttaatctgggctagtaaatggccagaaagaactttataaaaatgaaatatacaaaatgacactagtatgtttaactaaaggtatagttacgacacttaaatttgcacgttataaataatatcaatataaaaactgatagcgtgggtccatttttaataaatatataaatattttaaactttctagatctaaagcttaaggactatggaatggatctcattgaagtttcaggcaatggatgtggggtagaagaagaaaacttcgaaggcttaagtaagttaactttctaatcctattataaaataattgggccacatgtcttagaattttgagtaacactgtcttgggaaacacaaaaacagttttttaaagccagttactagatatcatgtatatttgttgttatagcacttgagatatcttagtccttactttacagtctctttcagctctgaaacatcacacatctaagattcaagagtttgccgacctaactcgggttgaaacttttggctttcgggggaaagctctgagctcactttgtgcactgaggtgataaaatatttttatccattcacttgaccccttagaaaaacctctctgaaaattaattggaatcattattatttacaattttctatctcaatatctcagcttctagcttctgaattctgttttgtctcacagccaatctaagtcctagtacttctgaaatgtgagcaataaatgaatgaaatgaagcaaatagtattgtttaaaaaattggttacccttattaaaacagtaacttctcaatttgaacataacatatagataataaatgatagttaccattggttttcattatcaatttttagggaaacatttcaccaaagcactatttaattatagcacagatactaaatttttataaataattacatgcacacacacatatatacatatatatacatatatatacatatatatacatatatgtatacatatatatacatatatgtatacatatatatacatatatacatatatacatatatatacatatatacatatatatatacacacacacatatatatatatatatatatatttttttttttttagacagagtcgcactctgtcacccaggctggagtgcagtggcacagtctcagctcactgcagtctctgcctcccaggttcaagtgactttcgtgactcagcctcctgaagagctgggactatagcgtgcaccaccactcctggctaatttttgtatttttagtagagatggggttttgccatgttgcccaggctggtctggaactccaggcctcaagtgatctgccctccttggcctcccaaagtgctggaattacaggcacgagccaccgcaccctgccctacatatacattttaattataatatcttttggattctttaaaaaaatttttaaaaattttaaaaaattctttaaaaaaattcttttaaaaaattttgtttgaagagtaataacaaaacaaatctctatttgagaatcaataaatcttgagatcatttatggttttgcaattcaacctgaaaaatgaagtcagagcttttatcaaaacaaagcatgtttagtgctctctgtctcactgtcttttagatgccagaccttagattttgtgatgactcctcaaccgtttagatctcggttatctcagagggatcatcagctttttaagaaaattttgagagaaaagcaagtgaagaaaagagtagtcagtgcccaacatcacggatctctcactgaacacaccatgcctggtattctctcacagtgatgtcaccatttctacctgccacgtatcggcgaaggttgggactcgactggtgtttgatcacgatgggaaaatcatccagaaaaccccctacccccaccccagagggaccacagtcagcgtgaagcagttattttctacgctacctgtgcgccataaggaatttcaaaggaatattaagaaggtacagtaaattaatcctggttttcaagagtattggttaatgcacacgagcaaaagatttactaaagatgtttattcttcagttgattctcttcccataatttattgagaaatgctttatttgcatttctcattaaagacttaacttcaggatgatttacttttttctttttatcacataatgtttattaggactgggaaacatagtgagactctgtctctatgaaaaattaaaaaaaaaattgactgggcatggtggcatgcacctgtagttccagctacttgggaggctgaagtgggaggatcacctgagcccaggaacttgagactgcagtgagctatgattgcgtcaccacacttcagactgtgagacagagtaagaccctgtctggaaaaatatatatacatatatatacattttttttattttttatttttatctttttttgagatggagtctcactttggcgccctggctgcagtgcagtggcgcgatctcagttcactgcaacctccacctgccaagttcaagcgattctcctgcttcagccttctgagtagctaccattacaggcgcgcgccaccacgcccggctaatttttgtattttcagtggagacggggttccaccatgttgtccaggctggccaggctggtctcgaattcctgccctcaggtgatccgcccacctcggcctctcaaagtgctgggattacaggcgtgagccaccatgcctgaccttatgtacttatatttttatgagaatatttctcttggttttctgataaatgagttactggcacccttatgaatttgaatgcaaatgaaacagctaaatgttatataattgtcgtgtttaaaaagcagattataaaactgtctgtattatatgattacagttttataaaaacaaaacaggcctaaatgtgtatagtataaagactgaagagtcagcacttccatgttctcagcggttatccttggatgtgagatctcatgcactttttgctctcttctttgtgcctttccattttgcatgcgtatttcttataatctaaaaagttacttaaacatatgcagctaaaaactttttttacttgtaaagcgtttggtgctaattttaacttttttttttagacggagtcttctcactctgtcgcccaggctggagtgcagtggtgtgatcttggctcactgcaacctccgcctcctgggttcaagtgattctcctacctcagcctcccaagtagctgggattataggtgtgtgtcaccacacccagctaatttttgtatttttagtagagatggggtttcaccatgttggccaggctggtcttgcacccctgacctcaagtgatctgcccacctcagcctcccaaagtgctggggttacaggcgtgagccaccacgcctggcttttttttttaaagcttttttgtaagtcagccagcaagaacacaggaggaagtactcaaatctcccttacacagctgggggctatgtcaggttttataagcatagggtaatgaggtgtgatttgattggatcttgcaataaagtaatgctgggaggtgtgatctgactggatcctgccatggggtgacaccaaaactcaatctgattggatcctggctcctgcctgggggtgtctggttcttaaatcggtccgagctcttcaggctgagctcttaggttccactccacggtggcacgcgtggttaacctgggcatgcacagggtacatgaccttcaacctgcaggtcgatggcaattggaaaacaactgacaacttcattacataaaagttgaactgattcgggtgcggtgactcacgcctgtaatcccagcactttgggaggccaaggcaggtggatcacctgaggtcgaggagttcaagaccagcctggccaaaatggtgaaaccccgtctctactaaaaatataaatattagccaggcgtggtggcgcacccttgtaatcccagctaccccagaggctgaggcagcagaatgcttgaacctaggacgtggaggttgcagtgagctgagatcgtgccattgcactccagcctgggtgacaagagtgaaactccatcaaaaaaaaaaaaagttgaactagatttggtctgatgcagttacagatttacaaaccgcgtcccaccctcctgccaacaccttccactcctcattcttgagggattagggatggaggtcatgcttctgtatcgacttcatgctgaccaggggcacttagtcccctaaagtgagaggaatgaaactcttgggcttctgagttcagatgagttctggggtcacccggagtagcttgaaaggctggtattgttgtaatacaagctgaaggtggaagtgttggatcctggaggacaaacagctcaccatccatttaaataaataggaccaaaaagtaacggaacagtggccacgaggggccccaacagaggaagaaaccaggtgaggtgtggtatagtggactcgactgccttctaaatctcagtggttgtccgggtgcggtggctcacacctgtaattccagcaaaagaagagccgaggcagggtgatcacgaggtcaggagttcaagaccagccgggcaaacatggtgaaaccccgtctctactgaaaatacaaaaattagccaggtgtggtggcgtgtgctgtagtcccagctactagggaggctgaggcaggagaattgcttgaacctgggaggcggaggttgcagtgagccgagattgtgccactgcactccagcctaggtaacagagcaggaccccatctcagtcaatcaatcaatctcagtggttgaactacccttgatatggttcagctctgtatccccaaccaaatctcatgtcaaattgcaattcccagtgttgagggagggacctggtgggagatgattggctcatggcggctgacgtcccccttgctggtctcgtgatagtgagtgagcgctcatgggatctggttgtttagaagcatgcagcacctcctgcttcactctctctgtctctcctgctccaccatggccagaaacgtgcctgcttccccttcgccttctgccgtgattgtcagcttcttgagggctccccagccatgcttcctgtacagcctgcaaaactgtgagtcaattaaacctcttttcttcataaattccccagtttccagtagttctttatagcagtgtgaaaacagactaatggacccttctggttgaaggaatgtagccattctgcttgtttaagtatttcctttctattcatctctatttcccgggaggtgtttatccaagtgcaataggagatattggtgactgcagagtcccctcagtgttctgctagtaaatagttgaaggttgatcagtgatctccagcattttcagtctggcatggaaaagcccccatgtaactggtaaaggtatcagtaagcaccaggaggtatctaaatccaccaggagccataggcatcatgttgatgtccatttaccagtcttccctggcaagattctctgaattgtactgccttggccaaaagaggtatgggaggggctgggcacagtggctcacgcctgtaatcccagcattttgggagaccaattcgggtagatcattagaggtcaggggttcaagaccatcctggccaacatggtgacattccatctctactaaaaatacaaaaagtcagcggggtttggtgttgggtgcctgtaatcccagctactcgggaggctgaggcaggataatcacttgaacctgggaggaggaggtggcagtgagctgagatctcgccattgcactccagcctgggcaacaagagcgaaacttcatctcaaaaaataaaaaaagaagtctgggtgtggtggctcgtgcctgtaatcccaggactttgggaggccaagatgggtggatcacgaggtcaggagttcaagaccagcctggcctagatggtgaaaccctgtctcgagtaaaaatacaaatattagctgggcatggtggcacacacctgtaatctcagctactcagaagtctgagacagaagaattgccaaaacccgggagggagaggttgcagtgagccgagatcgcgccactgcactctagcctgggcgacagagcaagactccgtctcgaaagaaagaaagagaaaggaaattccccagggaagtacctcggcttatttcatgaagaggtactgaaggaagcagaggcatgtggaggacttccccacctcgtgcagctatttgggccgtggcgtctgaaatttcttatttcagagtcacccctttgatgaccttggcagtggactgcagtcatctgtttaggcctctccatggcccgtgtcaatgccgatatttctgtctgttgcacatttgatttccttgttgttggcatttagaaggccccctgtttcccagatcacaccacgggcatggaccgcagagattgcatcttgtgagtctgtagaaacagtcaaggccttgtcctctcttaggtccagagctcaggtgaatacagattttcccagctgtctgtgctgaagtccctgtggggaggctcctggctggtttcctgtaggtagacagctacacgtcctgcccttcattggcttcttttcatgaagctcctgccatctacaaaacatgtctcccttcttgaatcacatctctgttattgaaactctagaagtcgaccgggcatggtggctatgcctataatcccagcattttgggatgccaaagcgggtggatcacctgaggtcaggagttcaagaccagcctggccaacatggcgaaatcccgtctctaatacaaatacaaaaattagccaagcatggtggccactgtactccagcctgggcgacagagcaagactccgtctcaaaaaaaaaaaaaaaaaaaaaaaaaaagagaaagaaagtatcatgcttttctgcattctgtgaattgttttagtgagttatcgaacttcagggcatggtgggaacctccaaatttgcagccagttggtgagaagtacatgtggtctgaggacacccaagcctgcaggtgtgtctaaagcgagggcagcctagtgggggctggtggccttaacctgtggcatttgaggtaacatcagggagttgacatcagaattgcatcacataggctgggcgcagtggctcacgcctgtaatcctagcactttgggaggccaaggcggagagatcacgaggtcaggagatcgagaccatcctggctaacacagtgaaaccccgtctctactaaaaatacaaaaaattagccaggcatggtggcgggcgcctgtagtcccagctactcgggaggctgaggcaggagaatggcgtgaacccaggaggcggagcttgcattgagccaagatcacgccaccgcactccagcctgggtgacagagcgagactccatcccccccccaaaaaaaaaaaagacaaaaaacagaattgtgtcacacaggccagatgcagtggctcatgcttataatcccagcaatttgaaaggcaaggtaagaggatcgcttgagcttgagcttgag

SEQ ID NO: 1719 - DNA, 979 bp, Homo sapiens
gtcaggagttcaagaccagcctggcctagatggtgaaaccctgtctcgagtgaaaatacaaatattagctgggcatggtggcacacacctgtaatctcagctactcagaagtctgagacagaagaattgccaaaacccgggagggagaggttgcagtgagccgagatcgcgccactgcactctagcctgggcgacagagcaagactccgtctcgaaagaaagaaagagaaaggaaattccccagggaagtacctcggcttatttcatgaagaggtactgaaggaagcagaggcatgtggaggacttccccacctcgtgcagctatttgggccgtggcgtctgaaatttcttatttcagagtcacccctttgatgaccttggcagtggactgcagtcatctgtttaggcctctccatggcccgtgtcaatgccgatatttctgtctgttgcacatttgatttccttgttgttggcatttagaaggccccctgtttcccagatcacaccacgggcatggaccgcagagattgcatcttgtgagtctgtagaaacagtcaaggccttgtcctctcttaggtccagagctcaggtgaatgcagattttcccggccatctgtgctgaagtccctgtggggaggctcctggctggtttcctgtaggtagacagctacacatcctgcccttcattggcttcttttcatgaagctcctgctgtctacaaaacatgtctcccttttcttcttgaaccacatctctgttattgaaactctagaagtcagccaggcacagtggctatgcctgtaatcccagcactttgggaggccaaggtgggtggatcacctgaggtcaggagttcaagaccagcctggccaacatggcgaaaccctgtctctaatacaaatactaaaattagccaagcatggtggccactgcactccagcctgggtgacagagcaagactctgtctcaaataaagaaa

SEQ ID NO: 1720 - DNA, 14426 bp, Homo sapiens
cccaccacacttggggaggcctccggatggatatgtccttccagctgatggacctcaggattgggagaaagatcggggacaagagacgggcacaacagtcacctggtttctttttcttcctttattttttgagactgagtctcgctttatcacctaggctagagtgcagtgacacgatcttggctcactgcaacctccacttcccaggttcaaatgattctcctgcctcagccttccgagtatctgggattacaggcgtgcactgccatacccgactaatttttggattttagtagagatggggttttgccatgttggccaggctggtcttgaactcctgacctcaagtgatctgcccaccttggcctcccaacgtgttgggattacaggtgtgagccaccgtgcccagccacatggtgtcttccgtgacagctccctctctgctgaaatagcatttcccacccccacccatggcatcactcttctgctgccattttcatcaaagactgatgtcacttggcatgtttttaggtttttttctggtggcttttatttttttaattttagagatgaggtctcactatgttgcccagcctagtctcaaattcctaagctcaagggatccacctgcctctatctcccaaagtgctggggttacaggcatgcaccaccacgcctggaccacattgcatgcattttatttaaatttttttttttttttttttaagacggagtctcattctgtcacccaggctgaagtgtagtggtgcgatcttggctcactgcaatcccgggttcaagcaattctcctgcctcagcctcccgagtagctgggattacaggcgtgagccactgtgcccggcctttatttaagatttgcctccttaaccattacacctgtaatcccagccctttgggaggctgaggtgggcagatcacctgagttcaggtgttcaagaccagccaggccaagatggtgaaaccacatctctactaaaaattccaaaattagccaggcgtggtggcaggcacctgtagtcccagctaatcagaaggctgaggcaggggaattgcttgaacctgggaggtggaggttgcagtgagccaagattgcaccactgcactccagcctgggcagcagagtgagactgtctcacaaaaaaaaaaaaaaagaagtgtcaggtgctggcagagacactgcttttccctaattgacccgtttggtcctcacattaaccatattttacagctactctcatttacagataaggaaactgggccaatgaggaggtgagaaatcgctcaaggctgccaggtacagtggctcatccctgtaatcccagcactttgggaggccaagggaggaggattaattgaggccaggagtttgagaccagcctaggcaacataatgagactctgtctctacaaaaaatttaaaaattagtggggtgtggtgatgcatgtgtagtcccagctactccggaggctgaggtgggaggatcgcttgatcccaggtgtctgagacagtagtgagctacgactgcaccactgcactacaacctcggtgatgcaatgagatgctgtctcaaaaaaaaaacacacacacacacaaaacaacaaaaaaacaaattgttcaaggcgagcctggtgtgccaagcccttgttctgggcacttggcttatattatctcccttaatccttcccaccaccccaagtgctagatactgggattaatttagttgagctgtaatacatcaatactgtgtgaaatgctatgcaacatctaaaaggaagacaggtggagcttttatttattttttattttatttattttttgagacgcagtctcgctgcattacccaacctggagtgcagtggcacaatcacagctcactgtagcctcaacctcctgggttcaaacaatcctcccacctcagcctctcaagtagctgggactacaggcttacaccaccaagcttggctaatttttttttttttttaagagatggtgttttgctaagttgcccacactgatctcaaaatccttttgtttttgctttggaatggtctggaactcctgagctcaagtgatcctcccaccttggcctcccaaaggcctgggattacacgtatgagccaccgcaccaagcccaggttgagcttttaaggtattaaagatccactaggtgaaaaaaaagagtgaaagatacatatgccatttaagggaagcacaggaaaactcctattttgtttatatgtgaatagaggcgcatagatgcctagaaaagtgtctgggagggaatgaaaccagattggccacaaaaatcacctctggaaaaaggaaaagaatggggactttcactttttgcttcatatgtttcatgcacctttttttttttttttttttgagatggagtttcactcttattgcccaggctggggtgcagtggtgcaatctcagctcactgcaacctctgcctcctaggttcaagcgattctcctgcctcagcctcccgagtagctgggattacaggcatgcgccaccacgcccggctaattttttgtgtttttagtagagacgaggtttctccatgttggtcaggctggtctcgaactcctgacatcaggtgatccgcccaccttggcctcccaaagtgctgggattacaggcgtgagccaccgcgcccagccgctttttctttttaaaaagtaaaatataacagagaaaactgcacaaaacagaagtgttcaaattaaattttttttttttgagacagggtcttgccctgttgcccaggctggagtgcagtggctcattcatagctcactgcagcctcaaactcctgggttcaagcgatcctcccaccccagcctcctgagtggctggaaggccaagggaggatcgcttgagcccaggagtttgaggctgtgccaccacacgcagctgggtttttttttttttttttaattttttgtagagacagggtctcgctatgtcacccacgctggtctcaaactcacgggctcaagcaatcctcccatctttggcctcccaaagtactgagactacaaacatgagccatcttgcccagcccctagaacgtgttatcaaataaacaccgatgcaaccctcactcagccgagaagtaaaacattgccagccaatccctaaatgcttctgcttgccgcttcccaatcctaaccaatgccttctcctgacaattatgatggtcatgtctttgcatttctctaatgtttcccatcacgatcaaactagttttgttttgcctgtgtccaaactttgcataaatgagcagcatgtgtctggtggacctggcttcttccactcaacattatgataagaagattgaccatttggtgcccatagctattgctcttgcattttcattgctctatagattcttactcaacataccttaaaattttttttattctgaaataagagcgggatgctattaaaaaaagaaaaaagaagagaacaaaaaagtcctccagtaaatttaaaatatggtagtcaaggccgggcacggtggctcacacctgtaatcccagcactttgggaggctgaggtgggtggatcacccgaggtcaggagttcgagaccagcccggccaacatggcaaaaccctgtctctacgaaaaaaatacataaatcagccaggtgtggtggtgtgcacccgtaatcccagctacttgggaggctgagacatgagaattgcttgagcccgggaggcagaggtttcggtgagctgagaactgccactgcactccagcctgggtgacagaatgagactataaaagaaagaaagagagaaagagagagagaaaggaaggagagaagggaagggaggggaggagaggggaagggaggggaggggaggggagagaaggggaagggaagggaaggagaagggaaagggaagggaagaaaattagagattaattcaggagattcaacatccgcctaatagaaattctagaaagaggaaggagagaatagagaggccaggtgcagtggctcacacctataatctcagcactttgggaggctgaagtaggaggattgcttaaggccaggagtttgaggctgcagtgagctatgattgagccactgtactccagcctggaaaacaaagcaagacctcgtctctaaaagtaataatacgccgggacggtggctccccacactttgggagcctaaggtgggcggatcacttgaggtcaggctttcgagatcagcctggccaacatgatgaaacccaatctccactaaaaataaaaaaattagccaggtgtggtgctgcacacctgtaaccccagctacctggaggagacaggagaattgcttgaacccgggagatggaggttgcatgaggcgagattgcctcattgcactccagcctgggtgatagaatgagactctgtctcaaaataataataataataataaagttaaatataaataaataaaagcaaatgaatataatgagttttattcatttgttttgctgttgttattgttttggagacagagttttgttcttgtcgcccaggctggagtacaatgatgcgatctggtctcactgcaaccttcgcttcctgggttcaagcgattctcctgccttagtctcctgagtagctgggattagaggcgtgtgacaccacgcccgggtaatttttgtatttttagtagagatggggtttcaccatgttggccaggctggtctcgaactcctgacctcaggtgatccaccaacctgggcctcccaaagtgctgggattacaggtatgagctatcatgcctggccccatttcttttaaaatcagaaggaaaaaatatatataacttttaggccaaaaatgtcttcacgtatattaatagattgatcttttcccaatgcaaccataaatatcattttttaaaattattattattttagaaacagggtctcactctgacgcccaggctgaagtgcagtggtatgatcttagctcactgcagcctccaattcctgggctcaagcgatcctcccacatcagcttcttgaatgtgacctcaggcagacgtcaccgtgcccagctaatttttaatgtaattttatttttttggtaaagatgggttctcattatgttgcccaggccagtcttgaactcctggcctcaagtgatcctcctgccttggcctcctaaggtgctggtattataggattgagccaccaagcccggcccgaatataatttttaatttttttttttaagacagagtttcactcttgttgcctaggctggagtgcagtggcatgatctcggctgaccgcaacctccacctcccgggttcaagcgattctcctgcctcagcctcctgagtagctgggattacaggcatgcaccaccacacccaaataattttctatttttagtagggacggggtttctccacattggtcaggctggtcttgaactcccgacctcaggtgatcctcccatctcggcctcataaagtgctgggattacaggcatgtgccaccacgcccggcctaattttctaatttttttttttaactgaagaaggaccccaggaagtcaaaagtgcctataacccatgaaagtctaaatgaggacaacggaggctgggcatggtggctcactcctgtaatcccagcactttgggaggccaaggtgggcggatcacctgaggtcaggagtttgagaccagcctggccaacatagtgaaaccctgtctctactaaaaaacacaaaaattagtcgggtgtggtggcgggcacctatgatcacagctactcaggagggtgaggcaggagaatcgcttgaacctaggaggcggaggctgcagtgggctgagatcgcaccactgcactccagcctgggggacagagcgagaccccgtctcaaacaaacaaaacaaaacaaaatgaggacaatggggcttccaatggcaactcgagacgttagtttactccagagtcatggagacagtgaatggagtgtgtgtgtgtgtgtgtgtgtgtgtgtgtgcgtgtgcgtgagtgagagagagagagaggaagaagggagggagggagggttacaggagtgtgggaaagtcaacaggaaaaggagggaaggttcactgtgaactgacagtaactgtgacatcacaggcatgtgcggagtccccgcccccccaggcactgtgccaaggccagtaccttcatgtcatgagaccctctcagcaactctgtaaccttgtccccaccagaatattcctttcacagctgagaaaacaacagcacagagaggatgaattaaaaattgtctaacatgctgggcgcagtggctcacgcctgtaatcccagcactttgggatgatgaggcaggtggatcacaaggtcaagagatcaagaccatcctggctaacacggtgaaaacccgtctctactaaaaatacaaaaaagttagccaggcgtggtggcgggcgcctgtagtcccagctgctcgggaggctgaggcaggagttgctgggcactggacacaaggatttctatcagtgtgctctcctgcacatcacccaggtctggagtgccaggaggatcaaaaacatagaatcaaagattagccaccttccaactccaagtttcccccaccccatgccaccgttcctgccttgtacaagtgaagcaagcaatctctcctggtttcaccctaggaggtggaaggtccctggccctggctccatgtggcacgtgctctggtccttctccagcagcaggcttgtcagaccctcccagtccttcagctgagtccctgcacagtcccacaggttgtctactaagtaagcagcgtggtcgtggagctggggaaggaggtgcatggggatttagtgatggcatgttaaaataccctaggaagtggttactgattaaatatcgctctccttcctacagtgtacacccccatccttctccatctgtctttttttttttttttttttttggtagagacagggtctcactatgttgcccaagctggtctcaaactcctgggctcaaaggatcctcccacctcagcctcccaaagtgttgggcttacaggcgtgaaccaccaaccccagcccacttgtaggtcctatgcacaacagccagagttatctctgtgtatgtcaccttgctctccacaaagaaggacagcagaagctggaagaaagtcctctgggcacctgggctctggcgttgctctcttccacccatcgttcttatctcgcactcagggtagaaaagtctggtggaatggacacaaggaaagggctcagcacaggaggaaacaaggaggtgtaatgatgaccacagagggaggagatggcccaaggagatgataaaggaaaaggaggtgcagagctaaggaaagccccaaggagctgagagaggaaaagagacagcagagagacttccacggagatggggaggccttaagtagggcagcagcacatgtgggagagaaaccgagagggtggtgttaaagaaacgtaaaaggagccccactcacttccagtacagaaattcacccacagcagaggccaggcctcaattagaggcctacacaatggggtagacgctctcacagtccacgtccatcagcaccccttccatgttcctgcccacagaaaagcagaaagagtgtgtgaatagggacattgtcttctggcacaatcaaggctagaaagaaaaagaggcaaaagcaacaaggacataactcacaaaaaactcctaaatggagagtggaagacaagggagtatggggagttagagaagacagaaatattaccctctcaacatactgcaactcaggaatgacctcagtcaacctgcacagatggaagagtcagctgtgacaggtggagggagatgaccctggaagggcaaaggtctgagacactggcctcccctcttcccaggactcacttaaggataagtatcagtaatctgacggcctccactgccacactgtactctctgtccacgatcatggaaaccatccagtcctgcagaaaggagaaagtcactcaatatctcattacgcccattccaaatattctgttctcttagaatcagagcctcctaaagagagtgcctacgtagaggcagatgctgggatagccaagacatcttagagcatgaagggtagaaagatacaaggtggggaaacgggaaccacgacaaagagccaagccaaggagcaccacccgtctcaccttgaagcggccagtgaagagctccaggcgtgcggtcaggtcccggttaccgtacagccctttcagagccttcacgcacttcacgcggacttctcggtgctggtgaggagggaaaaccaagagaatggaaataagaccaaccacactctactcgcccctactgagcgtccagactcccctctccgatccctcattctagcttgggtgtcccctctactgaggactctaagatgtcagaaacaatgaacagctgtcttcatacttaaaaaaaaaaaaggatcacagcagtactcatgatgagaaggatcctttggctgccccttagcacctgcattaccatccatcaataactgtcttccattgtaaagtctctctccccgtacctcatgttttgagtcatttcatctcctgggtatgtctctctctaccttatcctaccctccccagtgctagcggagtttcaaggttcagcgccttgatgggttaatcattggtcactaggtaaaatatctcagtggcaggcccaggaaaaggtgaagtgtcctaggacaggaaaaagatgaaggaaacggaaagggaaactgactcgaatcccaccttatcatgcagagtccaaccaatatattttaaatagctgtcggtgaggaaagacgtgctgtagctttgcatccaacacccaatttcctcaatgcagatagcacggatctcaggaaggacatccctagacacagacagataagttgactcttagagccaccctctctccaaactcactttccatcctaccagttaactccctctcatggaagaatttattttcttgaaatgccatgtaccccatgcctttcatttcttcctcccgatgtaaatactatatatatagtaaaatacatgtaaatattttttctcttttttttaagggatggggtctcttgctgtgttgcccaagctggccttgaactcctgggttcaagtcatcttcccactttggcctctcaagtagctaggactacaaaaatgtgccatacccagttagtaaatattttctttctgttaccaaaccataaaatagttaaacaccagccttgtacagcctaattctccactccacctgttgcccaggctggagtgcagcggcacaatctcagctcactgcaacctctacctctcgggttcaagtgattctcctgcttcagcctcctgagtagctgggattacaggtgcaccaccacgcccagctacctttttgtatttttagtagagatggggtttcaccatgttggccaggctggtctcgaacttctgacctcaagtgatctgcccgtcttggcctcccaaagtgctggagttacaggtgtgagccactgcacccggcctccatacctcttttaaaaaccaattttgaaagttcattcaggctgggcatggtggccaaaaattagccaagcatggtggcgggtgcctgtagtcccagctacttggcaggctgaggcaggagaatcgcctgaacccgggaggcggaggtgcagtgagccaagatcgcgtcactgcactccagcctggtgacagagcaagactccgtttcaaataaaaaactaacacactgtacaactgcatgtaaggtggaaaagacaactggaattaaaatgtgctcaggtccttgtagaagataagaaatccagaggaaagcaagcaaagggggaaaaagaaacagaaaagataaaatgattgtgccaactcaatactaggccataaggctaagtctccataaatgtctttttttttttttttttttttttgagacagagtatcactctgtcacccaggctggagtgccgtggcacaatctcagctcactgcaacctccacctcctgggttcaagcaattctcatgcctcagcctcccaagtggctgggattacagacaaatgccaccacatgcagctaatttgtgtatttttagtagagatggggtttcgccatgttggccaggctggtctcgaactcctggcctcaagtgatctgcctgcctcagcctccccaagtgctgggatcacagatgtgagccactgtgcccagcccctacataaatttcaaacaccacattccctgactacaacacaataaagttagaaatcaaataacgaaaatataactagcaaaattctgtatgtttgaaaattttaaatattttcccagaaactataaaactacatgttaatgtggataaatctcaaacaatcttaactgaaataattaaatcacagaagcctgaataatggattcatttacataattaaagaacacattcatagtggtaacactataatgaaagatgagaaagattaacacaaagttcaccctagtgtttacctatgggtaataaggggactgtgaggtagggtagaaagaaggtacacaaaggatctctacagcactattaatgtttcatttcttgagctggggctagagatctgggtgatatctcatttttattttttaaactacatatacgctttgtacactttcagatattagaacttcaataaaattataaaaaaagaaacagagagggaaaaaataattaagtataattgtcaagatggagctaaaaaataacacgggtgaacaaggtgccacccacatctaagcttccttcccatgtcatgcaatgcctctcctcatctgctccatcaatcaataaaggcataatcactcctgtgatacctttaagaaaagaacacgctttaagaaaagaaacgctctctcgaagccgagtgcggtggctcacacctgtaatcccagcactttgggaggccgaggcaggcggatcacctgaggtcaggagttggagaccagcctggccgacatggcgaaaccccatctctactaaaaatacaaaaattagctaggcatggtggcacatgcctgtaagcccagctacttgggaggcctcagcctcccaagaccatgagaatcgcttgaacccaggaggcagaggctgcagtgagctgagactgtgccactgcactccagcctgggcaacagaaagagactgtctcaaaaaaaaaaaaaaaaaaaaagaacatgctctcttattcaaggttacccttctatcactccaaggattcaccccataatcttatctttcttgatatgttacactcactaaaatgttcacatcaaatcaagtttgtagacacttgtccttaccaccttacaaaaagtgagatggtatcaacagaggtaagacactgcttttacctgcatgtcacttttggcagctttcgcagcattgaaaagatcattggctggtggctctgactgtttccggctatgacgatgtaccgcttgggaccctttctttggatattttgccacctgatacacataaaaagatcagaaatatgaaaaaaaggtaatagtgacattaacacttggtttcatcattatcacacaagtaggcttacgctgccaattccacagcagtctgagttagactcagtcctgaaataattgatttttgtattatgaagtttattaacttttttccctttaaaaaaaaaattccttgagtctccttcccgtatctctataaccaaacatccttttcttttcttttctcttcgaaatttctcttcttcctatttccgtcccttaatactttgtaaatcttgtccttttttgaaccatatcacctgaacctcttaggttttctcttttttttgagacggagtctcgctctgtcgcccaggctggcgtgcagtggcgtgatctcggctcactgccagctctgcccccggggttcgtgccattctcctgcctcagcctcccgaatagctgggctgcttcccccacaagattcaaaaacaaaagaaaactggctgactcaccggcgttgttttcagtggtcgttttgctgctttcttcttcacaccgcgattgaagctgtcctcaaatcattttcttgtcttcttgtctatttgtatgaattactgagttacattctcattgctacttatttaagcaaagtattcttagtttgttaagaacaaagaactacaaattgtgttcattttctgtcctttcctgttcttagactaaattacctgaaatacatcaaaatatatgctgtatgcttacctatatcaaaactatgttgtttaggtgccgggcacagtggctcacacctgtaatccagcactttgggagttcaaggcgggcggatcgcctgaggtcaggagttcaagaccagcctggtcaacatggcaaaaccccgtctctactaaaaatacaaaaattagccaggtgcagtggacagtgcctgtaatctcagctactcatgaggctgaggcctgagaattgcttgaacccaggaggccaaggtggcagtgagctgagatcatgccactgcactccagcctgggtgacagagtgaaactccgtctgaaaaaaacaaaacaaacaaacaaacaaaaaaccagaccatattgtttagggatacttagctgacaaaataatagagacaagcatgacataattaccataaaaatcaggccctggggtgctggtggggaaggtttaagtggaaagaatggagcggtgacaatgtgtgtcaacctgggaggtggtgaccctggggttcgctttgtaattcctcaaaatgagcatttatgtgctattcacttttcagaggatagaattctgaactaaaatgtttaagcagccatacgcaaaaaaaaaagaaaaaatatggatagatttttattttaattaaaacatttaaaaaatagagacaaggcagctgggcgtggtggctcacgcctgtaatcccagcaatttgggaggccgaggcaggcgaatcacgaggtcaagagatcgagaccatcctggctaacacggtgaaaccaagtctctactaaaaatacaaaataaagttagccaggcgtggtggcgggcgcctgtagtcccagctactggggaggctgaggcaggagaatggcgtgaacccgggaggtggagcttgcagtgagtcgagatcaggccactgcattccagcctgggcgacagagcaagactccaactcaaaaaaaaaaaaaaaacatagagacaagggtcttgctatgttgctcagggtggtctcaaactctccgggctcaagcaatcctcccgcttcggtctcccaaagcgctgagattccaggcgtgaaccaccgcgctcgaccaggaaaaaaatatatatatatataatatacaatatattttataatatattatgtcatatattacacataatatacaatatgtataatacgcataataaaggtatatttaatatatataaagatatatatgtatataataatttttttttttgagacggagtttcactcttgctgcccaggctcgagtgcaatggctcgatctcagctcactgcaagctccgcctccagggttcaaaccattctcctgcctcagcctcccgagtagctgcgattacaggcgcccgacacacgcccggctaatttttgcatttttagtagacacggggtttcaccatgttggccagactggtctcgaactcctgatctcaggtgatccgcccgcctcggcctcccaaagtgccgggattacaggcgtgagccacggcgcccggcctgaataaatcttttaaaacataaaaatctgggtgagcccctggccggccggcacagatgccggggtggggccgcgaatcggttgggaagcactctatccggcctaggggcacccgggccagcacccggccgccgcgcgtgcgcagtgggcggggtgccccgcgctcctacctgcaagtggccagtgccaagtgctgggccgccgctcctgccgtgcatgttggggagccagtacatgcaggtgggctccacacggagaggggcgcagacccggtgatagggctttacctggtacatcggcatggcgcaaccaaagcaagagagggtggcgcgtgccagacaccaacggtcggaaaccgccagacaccaacggtcggaaaccgccagacaccaacgctcggaaaccgccagacaccaacgctcggaaaccgccagacaccaaggctcggaatacacgccagaccacgacggagggcgaccacctcccttctgaccctgct

SEQ ID NO: 1721 - DNA, 14417 bp, Homo sapiens
cccaccacacttggggaggcctccggatggatatgtccttccagctgatggacctcaggattgggagaaagatcggggacaagagacgggcacaacagtcacctggtttctttttcttcctttattttttgagactgagtctcgctttatcacctaggctagagtgcagtgacacgatcttggctcactgcaacctccacttcccaggttcaaatgattctcctgcctcagccttccgagtatctgggattacaggcgtgcactgccatacccgactaatttttggattttagtagagatggggttttgccatgttggccaggctggtcttgaactcctgacctcaagtgatctgcccaccttggcctcccaacgtgttgggattacaggtgtgagccaccgtgcccagccacatggtgtcttccatgacagctccctctctgctgaaatagcatttcccacccccacccatggcatcactcttctgctgccattttcatcaaagactgatgtcacttggcatgtttttaggtttttttctggtggcttttatttttttaattttagagatgaggtctcactatgttgcccagcctagtctcaaattcctaagctcaagggatccacctgcctctatctcccaaagtgctggggttacaggcatgcaccaccacgcctggaccacattgcatgcattttatttaaatttttttttttttttttttaagacggagtctcattctgtcacccaggctgaagtgtagtggtgcgatcttggctcactgcaatcccgggttcaagcaattctcctgcctcagcctcccgagtagctgggattacaggcgtgagccactgtgcccggcctttatttaagatttgcctccttaaccattacacctgtaatcccagccctttgggaggctgaggtgggcagatcacctgagttcaggtgttcaagaccagccaggccaagatggtgaaaccacatctctactaaaaattccaaaattagccaggcgtggtggcaggcacctgtagtcccagctaatcagaaggctgaggcaggggaattgcttgaacctgggaggtggaggttgcagtgagccaagattgcaccactgcactccagcctgggcagcagagtgagactgtctcacaaaaaaaaaaaaaaagaagtgtcaggtgctggcagagacactgcttttccctaattgacccgtttggtcctcacattaaccatattttacagctactctcatttacagataaggaaactgggccaatgaggaggtgagaaatcgctcaaggctgccaggtacagtggctcatccctgtaatcccagcactttgggaggccaagggaggaggattaattgaggccaggagtttgagaccagcctaggcaacataatgagactctgtctctacaaaaaatttaaaaattagtggggtgtggtgatgcatgtgtagtcccagctactccggaggctgaggtgggaggatcgcttgatcccaggtgtctgagacagtagtgagctacgactgcaccactgcactacaacctcggtgatgcaatgagatgctgtctcaaaaaaaaaacacacacacacacaaaacaacaaaaaaacaaattgttcaaggcgagcctggtgtgccaagcccttgttctgggcacttggcttatattatctcccttaatccttcccaccaccccaagtgctagatactgggattaatttagttgagctgtaatacatcaatactgtgtgaaatgctatgcaacatctaaaaggaagacaggtggagcttttatttattttttattttatttattttttgagacacagtctcgctgcattacccaacctggagtgcagtggcacaatcacagctcactgtagcctcaacctcctgggttcaaacaatcctcccacctcagcctctcaagtagctgggactacaggcttacaccaccaagcttggctaatttttttttttttttaagagatggtgttttgctaagttgcccacactgatctcaaaatccttttgtttttgctttggaatggtctggaactcctgagctcaagtgatcctcccaccttggcctcccaaaggcctgggattacacgtatgagccaccgcaccaagcccaggttgagcttttaaggtattaaagatccactaggtgaaaaaaaagagtgaaagatacatatgccatttaagggaagcacaggaaaactcctattttgtttatatgtgaatagaggcgcatagatgcctagaaaagtgtctgggagggaatgaaaccagattggccacaaaaatcacctctggaaaaaggaaaagaatggggactttcactttttgcttcatatgtttcatgcacctttttttttttttttttttgagatggagtttcactcttattgcccaggctggggtgcagtggtgcaatctcagctcactgcaacctctgcctcctaggttcaagcgattctcctgcctcagcctcccgagtagctgggattacaggcatgcgccaccacgcccggctaattttttgtgtttttagtagagacgaggtttctccatgttggtcaggctggtctcgaactcctgacatcaggtgatccgcccaccttggcctcccaaagtgctgggattacaggcgtgagccaccgcgcccagccgctttttctttttaaaaagtaaaatataacagagaaaactgcacaaaacagaagtgttcaaattaaattttttttttttgagacagggtcttgccctgttgcccaggctggagtgcagtggctcattcatagctcactgcagcctcaaactcctgggttcaagcgatcctcccaccccagcctcctgagtggctggaaggcgaagggaggatcgcttgagcccaggagtttgaggctgtgccaccacacgcagctgggtttttttttttttttttaattttttgtagagacagggtctcgctatgtcacccacgctggtctcaaactcacgggctcaagcaatcctcccatctttggcctcccaaagtactgagactacaaacatgagccatcttgcccagcccctagaacgtgttatcaaataaacaccgatgcaaccctcactcagccgagaagtaaaacattgccagccaatccctaaatgcttctgcttgccgcttcccaatcctaaccaatgccttctcctgacaattatgatggtcatgtctttgcatttctctaatgtttcccatcacgatcaaactagttttgttttgcctgtgtccaaactttgcataaatgagcagcatgtgtctggtggacctggcttcttccactcaacattatgataagaagattgaccatttggtgcccatagctattgctcttgcattttcattgctctatagattcttactcaacataccttaaaattttttttattctgaaataagagcgggatgctattaaaaaaagaaaaaagaagagaacaaaaaagtcctccagtaaatttaaaatatggtagtcaaggccgggcacggtggctcacacctgtaatcccagcactttgggaggctgaggtgggtggatcacccgaggtcaggagttcgagaccagcccggccaacatggcaaaaccctgtctctacgaaaaaaatacataaatcagccaggtgtggtggtgtgcacccgtaatcccagctacttgggaggctgagacatgagaattgcttgagcccgggaggcagaggtttcggtgagctgagaactgccactgcactccagcctgggtgacagaatgagactataaaagaaagaaagagagaaagagagagagaaaggaaggagagaagggaagggaggggaggagaggggaagggaggggaggggaggggagagaaggggaagggaagggaaggagaagggaaagggaagggaagaaaattagagattaattcaggagattcaacatccgcctaatagaaattctagaaagaggaagtagagaatagagaggccaggtgcagtggctcacacctataatctcagcactttgggaggctgaagtaggaggattgcttaaggccaggagtttgaggctgcagtgagctatgattgagccactgtactccagcctggaaaacaaagcaagacctcgtctctaaaagtaataatacgccgggacggtggctccccacactttgggagcctaaggtgggcggatcacttgaggtcaggctttcgagatcagcctggccaacatgatgaaacccaatctccactaaaaataaaaaaattagccaggtgtggtgctgcacacctgtaaccccagctacctggaggagacaggagaattgcttgaacccgggagatggaggttgcatgaggcgagattgcctcattgcactccagcctgggtgatagaatgagactctgtctcaaaataataataataataataaagttaaatataaataaataaaagcaaatgaatataatgagttttattcatttgttttgctgttgttattgttttggagacagagttttgttcttgtcgcccaggctggagtacaatgatgcgatctggtctcactgcaaccttcgcttcctgggttcaagcgattctcctgccttagtctcctgagtagctgggattagaggcgtgtgacaccacgcccgggtaatttttgtatttttagtagagatggggtttcaccatgttggccaggctggtctcgaactcctgacctcaggtgatccaccaacctgggcctcccaaagtgctgggattacaggtatgagctatcatgcctggccccatttcttttaaaatcagaaggaaaaaatatatataacttttaggccaaaaatgtcttcacgtatattaatagattgatcttttcccaatgcaaccataaatatcattttttaaaattattattattttagaaacagggtctcactctgacgcccaggctgaagtgcagtggtatgatcttagctcactgcagcctccaattcctgggctcaagcgatcctcccacatcagcttcttgaatgtgacctcaggcagacgtcaccgtgcccagctaatttttaatgtaattttatttttttggtaaagatgggttctcattatgttgcccaggccagtcttgaactcctggcctcaagtgatcctcctgccttggcctcctaaggtgctggtattataggattgagccaccaagcccggcccgaatataatttttaattttttttttaagacagagtttcactcttgttgcctaggctggagtgcagtggcatgatctcggctgaccgcaacctccacctcccgggttcaagcgattctcctgcctcagcctcctgagtagctgggattacaggcatgcaccaccacacccaaataattttctatttttagtagggacggggtttctccacattggtcaggctggtcttgaactcccgacctcaggtgatcctcccacctcggcctcataaagtgctgggattacaggcatgtgccaccacgcccggcctaattttctaatttttttttttaactgaagaaggaccccaggaagtcaaaagtgcctataacccatgaaagtctaaatgaggacaacggaggctgggcatggtggctcactcctgtaatcccagcactttgggaggccaaggtgggcggatcacctgaggtcaggagtttgagaccagcctggccaacatagtgaaaccctgtctctactaaaaaacacaaaaattagtcgggtgtggtggcgggcacctatgatcacagctactcaggagggtgaggcaggagaatcgcttgaacctaggaggcggaggctgcagtgggctgagatcgcaccactgcactccagcctgggggacagagcgagaccccgtctcaaacaaacaaaacaaaacaaaatgaggacaatggggcttccaatggcaactcgagacgttagtttactccagagtcatggagacagagaatggagtgtgtgtgtgtgtgtgtgtgtgtgtgtgtgtgcgtgtgcgtgagtgagagagagagagaggaagaagggagggagggagggttacaggagtgtgggaaagtcaacaggaaaaggagggaaggttcgctgtgaactgacagtaactgtgacatcacaggcatgtgcggagtccccgcccccccaggcactgtgccaaggccagtaccttcatgtcatgagaccctctcagcaactctgtaaccttgtccccaccagaatattcctttcacagctgagaaaacaacagcacagagaggatgaattaaaaattgtctaacatgctgggcgcagtggctcacgcctgtaatcccagcactttgggatgatgaggcaggtggatcacaaggtcaagagatcaagaccatcctggctaacacggtgaaaacccgtctctactaaaaatacaaaaaagttagccaggcgtggtggcgggcgcctgtagtcccagctgctcgggaggctgaggcaggagttgctgggcactggacacaaggatttctatcagtgtgctctcctgcacatcacccaggtctggagtgccaggaggatcaaaaacatagaatcaaagattagccaccttccaactccaagtttcccccaccccatgccaccgttcctgccttgtacaagtgaagcaagcaatctctcctggtttcaccctaggaggtggaaggtccctggccctggctccatgtggcacgtgctctggtccttctccagcagcaggcttgtcagaccctcccagtccttcagctgagtccctgcacagtcccacaggttgtctactaagtaagcagcgtggtcgtggagctggggaaggaggtgcatggggatttagtgatggcatgttaaaataccctaggaagtggttactgattaaatatcgctctccttcctacagtgtacacccccatccttctccatctgtcttttttttttttttttttttttggtagagacagggtctcactatgttgcccaagctggtctcaaactcctgggctcaaaggatcctcccacctcagcctcccaaagtgttgggcttacaggcgtgaaccaccaaccccagcccacttgtaggtcctatgcacaacagccagagttatctctgtgtatgtcaccttgctctccacaaagaaggacagcagaagctggaagaaagtcctctgggcacctgggctctggcgttgctctcttccacccatcgttcttatctcgcactcagggtagaaaagtctggtggaatggacacaaggaaagggctcagcacaggaggaaacaaggaggtgtaatgatgaccacagagggaggagatggcccaaggagatgataaaggaaaaggaggtgcagagctaaggaaagccccaaggagctgagagaggaaaagagacagcagagagacttccacggagatggggaggccttaagtagggcagcagcacatgtgggagagaaaccgagagggtggtgttaaagaaacgtaaaaggagccccactcacttccagtacagaaattcacccacagcagaggccaggcctcaattagaggcctacacaatggggtagacgctctcacagtccacgtccatcagcaccccttccatgttcctgcccacagaaaagcagaaagagtgtgtgaatagggacattgtcttctggcacaatcaaggctagaaagaaaaagaggcaaaagcaacaaggacataactcacaaaaaactcctaaatggagagtggaagacaagggagtatggggagttagagaagacagaaatattaccctctcaacatactgcaactcaggaatgacctcagtcaacctgcacagatggaagagtcagctgtgacaggtggagggagatgaccctggaagggcaaaggtctgagacactggcctcccctcttcccaggactcacttaaggataagtatcagtaatctgacggcctccactgccacactgtactctctgtccatgatcatggaaaccatccagtcctgcagaaaggagaaagtcactcaatatctcattacgcccattccaaatattctgttctcttagaatcagagcctcctaaagagagtgcctacgtagaggcagatgctgggatagccaagacatcttagagcatgaagggtagaaagatacaaggtggggaaacgggaaccacgacaaagagccaagccaaggagcaccacctgtctcaccttgaagcagccagtgaagagctccaggcgtgcggtcaggtcccggttaccgtacagccctttcagagccttcacgcacttcacgcggacttctcggtgctggtgaggagggaaaaccaagagaatggaaataagaccaaccacactctactcgcccctactgagcgtccagactcccctctccgatccctcattctagcttgggtgtcccctctactgaggactctaagatgtcagaaacaatgaacagctgtcttcatacttaaaaaaaaaaaaggatcacagcagtactcatgatgagaaggatcctttggctgccccttagcacctgcattaccatccatcaataactgtcttccattgtaaagtctctctccccgtacctcatgttttgagtcatttcatctcctgggtatgtctctctctaccttatcctaccctccccagtgctagcggagtttcaaggttcagcgccttgatgggttaatcattggtcactaggtaaaatatctcagtggcaggcccaggaaaaggtgaagtgtcctaggacaggaaaaagatgaaggaaacggaaagggaaactgactcgaatcccaccttatcatgcagagtccaaccaatatattttaaatagctgtcggtgaggaaagacgtgctgtagctttgcatccaacacccaatttcctcaatgcagatagcacggatctcaggaaggacatccctagacacagacagataagttgactcttagagccaccctctctccaaactcactttccatcctaccagttaactccctctcatggaagaatttattttcttgaaatgccatgtaccccatgcctttcatttcttcctcccgatgtaaatactatatatatagtaaaatacatgtaaatattttttctcttttttttaagggatggggtctcttgctgtgttgcccaagctggccttgaactcctgggttcaagtcatcttcccactttggcctctcaagtagctaggactacaaaaatgtgccatacccagttagtaaatattttctttctgttaccaaaccataaaatagttaaacaccagccttgtacagcctaattctccactccacctgttgcccaggctggagtgcagcggcacaatctcagctcactgcaacctctacctctcgggttcaagtgattctcctgcttcagcctcctgagtagctgggattacaggtgcaccaccacgcccagctacctttttgtatttttagtagagatggggtttcaccatgttggccaggctggtctcgaacttctgacctcaagtgatctgcccgtcttggcctcccaaagtgctggagttacaggtgtgagccactgcacccggcctccatacctcttttaaaaaccaattttgaaagttcattcaggctgggcatggtggccaaaaattagccaagcatggtggcgggtgcctgtagtcccagctacttggcaggctgaggcaggagaatcgcctgaacccgggaggcggaggtgcagtgagccaagatcgcgtcactgcactccagcctggtgacagagcaagactccgtttcaaataaaaaactaacacactgtacaactgcatgtaaggtggaaaagacaactggaattaaaatgtgctcaggtccttgtagaagataagaaatccagaggaaagcaagcaaagggggaaaaagaaacagaaaagataaaatgattgtaccaactcaatactaggccataaggctaagtctccataaatttttttttttttttttttttttttgagacagagtatcactctgtcacccaggctggagtgccgtggcacaatctcagctcactgcaacctccacctcctgggttcaagcaattctcatgcctcagcctcccaagtggctgggattacagacaaatgccaccacatgcagctaatttgtgtatttttagtagagatggggtttcgccatgttggccaggctggtctcgaactcctggcctcaagtgatctgcctgcctcagcctccccaagtgctgggatcacagatgtgagccactgtgcccagcccccacataaatttcaaacaccacattccctgactacaacacaataaagttagaaatcaaataacgaaaatataactagcaaaattctgtatgtttgaaaattttaaatattttcccagaaactataaaactacatgttaatgtggataaatctcaaacaatcttaactgaaataattaaatcacagaagcctgaataatggattcatttacataattaaagaacacattcatagtggtaacactataatgaaagatgagaaagattaacacaaagttcaccctagtgtttacctatgggtaataaggggactgtgaggtagggtagaaagaaggtacacaaaggatctctacagcactattaatgtttcatttcttgagctggggctagagatctgggtgatatctcatttttattttttaaactacatatacgctttgtacactttcagatattagaacttcaataaaattataaaaaaagaaacagggaaaaaataattaagtataattgtcaagatggagctaaaaaataacacgggtgaacaaggtgccacccacatctaagcttccttcccatgtcatgcaatgcctctcctcatctgctccatcaatcaataaaggcataatcactcctgtgatacctttaagaaaagaacacgctttaagaaaagaaacgctctctcgaagccgggtgcggtggctcacacctgtaatcccagcactttgggaggccgaggcaggcggatcacctgaggtcaggagttggagaccagcctggccgacatggcgaaaccccatctctactaaaaatacaaaaattagctaggcatggtggcacatgcctgtaagcccagctacttgggaggcctcagcctcccaagaccatgagaatcgcttgaacccaggaggcagaggctgcagtgagctgagactgtgccactgcactccagcctgggcaacagaaagagactgtctcaaaaaaaaaaaaaaaaaaaaaaagaacatgctctcttattcaaggttacccttctatcactccaaggattcaccccataatcttatctttcttgatatgttacactcactaaaatgttcacatcaaatcaagtttgtagacacttgtccttaccaccttacaaaaagtgagatggtatcaacagaggtaagacactgcttttacctgcatgtcacttttggcagctttcgcagcattgaaaagatcattggctggtggctctgactgtttccggctatgacgatgtaccgcttgggaccctttctttggatattttgccacctgatacacataaaaagatcagaaatatgaaaaaaaggtaacagtgacattaacacttggtttcatcattatcacacaagtaggcttacgctgccaattccacagcagtctgagttagactcagtcctgaaataattgatttttatattatgaagtttattaacttttttccctttaaaaaaaaaattccttgagtctccttcccgtatctctataaccaaacatccttttcttttcttttcgaaatttctcttcttcctatttccgtcccttaatactttgtaaatcttgtccttttttgaaccatatcacctgaacctcttaggttttctcttttttttgagacggagtctcgctctgtcgcccaggctggcgtgcagtggcgtgatctcggctcactgccagctctgcccccggggttcgtgccattctcctgcctcagcctcccgaatagctgggctgcttcccccacaagattcaaaaacaaaagaaaactggctgactcaccggcgttgttttcagtggtcgttttgctgctttcttcttcacaccgcgattgaagctgtcctcaaatcattttcttgtcttcttgtctatttgtatgaattactgagttacattctcattgctacttatttaagcaaagtattcttagtttgttaagaacaaagaactacaaattgtgttcattttctgtcctttcctgttcttagactaaattacctgaaatacatcaaaatatatgctgtatgcttacctatatcaaaactatgttgtttaggtgccgggcacagtggctcacacctgtaatccagcactttgggagttcaaggcgggcggatcgcctgaggtcaggagttcaagaccagcctggtcaacatggcaaaaccccgtctctactaaaaatacaaaaattagccaggtgcagtggacagtgcctgtaatctcagctactcatgaggctgaggcctgagaattgcttgaacccaggaggccaaggtggcagtgagctgagatcatgccactgcactccagcctgggtgacagagtgaaactccgtctgaaaaaaacaaaacaaacaaacaaacaaaaaaccagaccatattgtttagggatacttagctgacaaaataatagagacaagcatgacataattaccataaaaatcaggccctggggtgctggtggggaaggtttaagtggaaagaatggagcggtgacaatgtgtgtcaacctgggaggtggtgaccctggggttcgctttgtaattcctcaaaatgagcatttatgtgctattcacttttcagaggatagaattctgaactaaaatgtttaagcagccatacgcaaaaaaagaaaaaatatggatagatttttattttaattaaaacatttaaaaaatagagacaaggcagctgggcgtggtggctcacgcctgtaatcccagcaatttgggaggccgaggcaggcgaatcacgaggtcaagagatcgagaccatcctggctaacacggtgaaaccaagtctctactaaaaatacaaaataaagttagccaggcgtggtggcgggcgcctgtagtcccagctactggggaggctgaggcaggagaatggcgtgaacccgggaggtggagcttgcagtgagtcgagatcaggccactgcattccagcctgggcgacagagcaagactccaactcaaaaaaaaaaaaaaaacatagagacaagggtcttgctatgttgctcagggtggtctcaaactctccgggctcaagcaatcctcccgcttcggtctcccaaagcgctgagattccaggcgtgaaccaccgcgctcgaccaggaaaaaaatatatatatatataatatacaatatattttataatatattatgtcatatattacacataatatacaatatgtataatacgcataataaaggtatatttaatatatataaagatatatatgtatataataatttttttttttgagacggagtttcactcttgctgcccaggctcgagtgcaatggctcgatctcagctcactgcaagctccgcctccagggttcaaaccattctcctgcctcagcctcccgagtagctgcgattacaggcgcccgacacacgcccggctaatttttgcatttttagtagacacggggtttcaccatgttggccagactggtctcgaactcctgatctcaggtgatccgcccgcctcggcctcccaaagtgccgggattacaggcgtgagccacggcgcccggcctgaataaatcttttaaaacataaaaatctgggtgagcccctggccggccggcacagatgccggggtggggccgcgaatcggttgggacgcactctatccggcctaggggcacccgggccagcacccggccgccgcgcgtgcgcagtgggcggggtgccccgcgctcctacctgcaagtggccagtgccaagtgctgggccgccgctcctgccgtgcatgttggggagccagtacatgcaggtgggctccacacggagaggggcgcagacccggtgatagggctttacctggtacatcggcatggcgcaaccaaagcaagagagggtggcgcgtgccagacaccaacggtcggaaaccgccagacaccaacggtcggaaaccgccaagacaccaacgctcggaaaccgccagacaccaacgctcggaaaccgccagacaccaaggctcggaatacacgccagaccacgacggagggcgaccacctcccttctgaccctgct

SEQ ID NO: 1722 - DNA, 975 bp, Homo sapiens
gtcaggagttcaagaccagcctggcctagatggtgaaaccctgtctcgagtgaaaatacaaatattagctgggcatggtggcacacacctgtaatctcagctactcagaagtctgagacagaagaattgccaaaacccgggagggagaggttgcagtgagccgagatcgcgccactgcactctagcctgggcgacagagcaagactccgtctcgaaagaaagaaagagaaaggaaattccccagggaagtacctcggcttatttcatgaagaggtactgaaggaagcagaggcatgtggaggacttccccacctcgtgcagctatttgggccgtggcgtctgaaatttcttatttcagagtcacccctttgatgaccttggcagtggactgcagtcatctgtttaggcctctccatggcccgtgtcaatgccgatatttctgtctgttgcacatttgatttccttgttgttggcatttagaaggccccctgtttcccagatcacaccacgggcatggaccgcagagattgcatcttgtgagtctgtagaaacagtcaaggccttgtcctctcttaggtccagagctcaggtgaatgcagattttcccggccatctgtgctgaagtccctgtggggaggctcctggctggtttcctgtaggtagacagctacacatcctgcccttcattggcttcttttcatgaagctcctgctgtctacaaaacatgtctcccttttcttcttgaaccacatctctgttattgaaactctagaagtcagccaggcacagtggctatgcctgtaatcccagcactttgggaggccaaggtgggtggatcacctgaggtcaggagttcaagaccagcctggccaacatggcgaaaccctgtctctaatacaaatactaaaattagccaagcatggtggccactgcactccagcctgggtgacagagcaagactctgtctcaaataaa

SEQ ID NO: 1723 - DNA, 14426 bp, Homo sapiens
cccaccacacttggggaggcctccggatggatatgtccttccagctgatggacctcaggattgggagaaagatcggggacaagagacgggcacaacagtcacctggtttctttttcttcctttattttttgagactgagtctcgctgtatcacctaggctagagtgcagtgacacgatcttggctcactgcaacctccacttcccaggttcaaatgattctcctgcctcagccttctgagtatctgggattacaggcgtgcactgccatacccgactaatttttggattttagtagagatggggttttgccatgttggccaggctggtcttgaactcctgacctcaagtgatctgcccaccttggcctcccaacgtgttgggattacaggtgtgagccaccgtgcccagccacatggtgtcttccgtgacagctccctctctgctgaaatagcatttcccacccccacccatggcatcactcttctgctgccattttcatcaaagactgatgtcacttggcatgtttttaggtttttttctggtggcttttatttttttaattttagagatgaggtctcactatgttgcccagcctagtctcaaattcctaagctcaagggatccacctgcctctatctcccaaagtgctggggttacaggcatgcaccaccacgcctggaccacattgcatgcattttatttaaattttttttttttttttttaagacggagtctcattctgtcacccaggctgaagtgtagtggtgcgatcttggctcactgcaatcccgggttcaagcaattctcctacctcagcctcccgagtagctgggattacaggcgtgagccactgtgcccggcctttatttaagatttgcctccttaaccattacacctgtaatcccagccctttgggaggctgaggtgggcagatcacctgagttcaggtgttcaagaccagccaggccaagatggtgaaaccacatctctactaaaaattccaaaattagccaggcgtggtagcaggcacctgtagtcccagctaatcagaaggctgaggcaggggaattgcttgaacctgggaggtggaggttgcagtgagccaagattgcaccactgcactccagcctgggcagcagagtgagactgtctcacaaaaaaaaaaaaaagaagtgtcaggtgctggcagagacactgcttttccctaattgacctgtttggtcctcacattaaccatattttacagctactctcatttacagataaggaaactgggccaatgaggaggtgagaaatcgctcaaggctgccaggtacagtggctcatccctgtaatcccagcactttgggaggccaagggaggaggattaattgaggccaggagtttgagaccagcctaggcaacataatgagactctgtctctacaaaaaatttaaaaattagtggggtgtggtgatgcatgtgtagtcccagctactccggaggctgaggtgggaggatcgcttgatcccaggtgtctgagacagtagtgagctacgattgcaccactgcactacaacctcggtgatgcaatgagacgctgtctcaaaaaaaaaaaaccacacacacacaaaacaacaaaaaaacaaattgttcaaggcgagcctggtgtgccaagcccttgttctgggcacttggcttatattatctcccttaatccttcccaccaccccaagtgctagatactgggattaatttagttgagctgtaatacatcaatactgtgtgaaatgctatgcaacatctaaaaggaagacaggtggagcttttatttattttttattttatttattttttgagacgcagtctcgctgcattacccaacctggagtgcagtggcacaatcacagctcactgtagcctcaacctcctgggttcaaacaatcctcccacctcagcctctcaagtagctgggactacaggcttacaccaccaagcttggctaattttttttttttttttttttagagatggtgttttgctaagttgtccacactgatctcaaaatccttttgtttttgctttggaatggtctggaactcctgagctcaagtgatcctcccaccttggcctcccaaaggcctgggattacacgtatgagccaccgcaccaagcccaggttgagcttttaaggtattaaagatccactaggtgaaaaaaaagagtgaaagatacatatgccatttaagggaagcacaggaaaactcctattttgtttatatgtgaatagaggcacatagatgcctagaaaagtgtctgggagggaatgaaaccagattggccacaaaaatcacctctggaaaaaggaaaagaatggggactttcactttttgcttcatatgtttcatgtacctttttttttttttttttgagatggagtttcactcttattgcccaggctggggtgcagtggtgcgatctcagctcactgcaacctctgcctcctaggttcaagcgattctcctgcctcagcctcccaagtagctgggattacaggcatgcgccaccacgcccggctaattttttgtgtttttagtagagacgaggtttctccatgttggtcaggctggtctcgaactcctgacatcaggtgatctacccactttggcctcccaaagtgctgggattacaggcgtgagccaccgcgcccagctgctttttctttttaaaaagtaaaatataacagagaaaactgcacaaaacagaagtgttcaaattaaatttttttttttttgagacagggtcttgccctgttgcccaggctggagtgcagtggctcattcatagctcactgcagcctcaaactcctgggttcaagcgatcctcccaccccagcctcctgagtggctggaaggccaagggaggatcgcttgagcccaggagtttgaggctgtgccaccacacgcagctggtttttttttttttttttaattttttgtagagacagggtctcgctatgtcacccacgctggtctcaaactcacgggctcaagcaatcctcccatctttggcctcccaaagtactgagactacaaacatgagccatcttgcccagcccctagaacgtgttatcaaataaacaccgatgcaaccctcactcagctgagaagtaaaacattgccagccaatccctaaatgcttctgcttgccgcttcccaatcctaaccaatgccttctcctgacaattatgatggtcatgtctttgcatttctctaatgtttcccatcacgatcaaactagttttgttttgcctgtgtccaaactttgcataaatgagcagcatgtgtctggtggacctggcttcttccactcaacattatgataagaagattgaccatttggtgcccatagctattgctcttgcattttcattgctctatagattcttactcaacataccttaaaaatttttttattctgaaataagagcgggatgctattaaaaaaagaaaaaagaagagaacaaaaaagtcctccagtaaatttaaaatatggtagtcaaggccgggcacggtggctcacacctgtaatcccagcactttgggaggctgaggtgggtggatcacccgaggtcaggagttcgagaccagcccggccaacatggcaaaaccctgtctctacgaaaaaaatacataaatcagccaggtgtggtggtgtgcacccgtaatcccagctactcgggaggctgagacatgagaattgcttgagcccgggaggcagaggtttcggtgagctgagaactgccactgcactccagcctgggtgacagaatgagactataaaagaaagaaagagagaaagagagagagaaaggaaggagggaagggaagggaggggaggggaggggaagggaggggaggggaggggagagaaggggaagggaagggaaggagaagggaaagggaagggaagaaaattagagattaattcaggagattcaacatccgcctaatagaaattctagaaagaggaagtagagaatagagaggccaggtgcagtggctcacacctataatctcagcactttgggaggctgaagtaggaggattgcttaaggccaggagtttgaggctgcagtgagctatgattgagccactgtactccagcctggaaaacaaagcaagacctcgtctctaaaagtaataatacgccgggacagtggctccccacactttgggaggctaaggtgggcggatcacttgaggtcaggctttcgagaccagcctggccaacatgatgaaacccaatctccactaaaaataaaaaaattagccaggtgtggtgctgcacacctgtaaccccagctacctgggaggagacaggagaatcgcttgaacccgggagatggaggttgcatgaggtgagatcgcctcattgcactccagcctgggtgatagaatgagactctgtctcaaaataataataataataataaagttaaatataaataaataaaagcaaatgaatataatgagttttattcatttgttttgctgttgttattgttttggagacagagttttgttcttgtcgcccaggctggagtacaatgatgcgatctggtctcactgcaaccttcgcttcctgggttcaagcgattctcctgccttagtctcctgagtagctgggattagaggcgtgtgacaccacgcccgggtaatttttgtatttttagtagagacggggtttcaccatgttggccaggctggtctcgaactcctgacctcaggtgatccaccaacctgggcctcccaaagtgctgggattacaggtatgagctatcatgcctggcctcatttcttttaaaatcagaaggaaaaaatatatataacttttaggccaaaaatgtcttcacatatattaatagattgatcttttcccaatgcaaccataaatatcattttttaaaattattattattttagaaacagggtctcactctgacgcccaggctgaagtgcagtggtatgatcttagctcactgtagcctccaattcctgggctcaagcgatcctcccacatcagcttcttgaatgtgacctcaggcagacgtcaccgtgcccagctaatttttaatgtaattttatttttttggtaaagatgggttctcattatgttgcccaggccggtcttgaactcctggcctcaagtgatcctcctgccttggcctcctaaggtgctggtattataggattgagccaccaagcccggcccgaatataatttttaaatttttttttttaagacagagtttcactcttgttgcctaggctggagtgcagtggcacgatctcggctgaccgcaacctccacctcccgggttcaagcgattctcctgcctcagcctcctgagtagctgggattacaggcatgcaccaccacacccaaataattttctatttttagtagagacagggtttctccacattggtcaggctggtcttgaactcccgacctcaggtgatcctcccacctcggcctcataaagtgctgggattacaggcatatgccaccacgcccggcctaattttctaatttttttttttaactgaagaaggaccccaggaagtcaaaagtgcctataacccaggaaagtctaaatgaggacaacggaggctgggcgtggtggctcactcctgtaatcccagcactttgggaggccaaggtgggcggatcacctgaggtcaggagttcgagaccagcctggccaacatagtgaaaccctgtctctactaaaaaacacaaaaattagtcgggtgtggtggcgggcacctatgatcacagcttctcaggagggtgaggcaggagaatcgcttgaacctaggaggcagaggctgcagtgggctgagatcgcaccactgcactccagcctgggggacagagcgagaccccgtctcaaacaaacaaaacaaaacaaaatgaggacaatggggcttccaatggcaactcgagacgttagtttactccagagtcatggagacagtgaatggagtgtgtgtgtgtgtgtgtgcgtgtgcgtgagtgagagagagaggaagaagggagggagggacggttacaggagtgtgggaaagtcaacaggaaaaggagggaaggttcgctgtgaactgacagtaactgtgacatcacaggcatgtgcggagtccccgcccccccaggcactgtgccaaggccagtaccttcatgtcatgagaccctctcagcaactctgtaaccttgtccccaccagaatattcctttcacagctgagaaaacaacagcacagagaggatgaattaaaaattgtctaacatgctgggcgcagtggctcacgcctgtaatcccagcactttgggatgatgaggcaggtggatcacaaggtcaagagatcaagaccatcctggctaacacggtgaaaacccgtctctactaaaaatacaaaaaagttagccgggcgtggtggcgggcacctgtagtcccagctgctcgggaggctgaggcaggagttgctgggcactggacacaaggatttctatcagtgtgctctcctgcacatcacccaggtctggagtgccaggaggatcaaaaacatagaatcaaagattagccaccttccaactccaagtttcccccaccccatgccaccgttcctgccttgtacaagtgaagcaagcaatctctcctggtttcaccctaggaggtggaaggtccctggccctggctccatgtggcacgtgctctggtccttctccagcagcaggcttgtcagaccctcccagtccttcagctgagtccctgcacagtcccacaggttgtctactaagtaagcagcgtggtcgtggagctggggaaggaggtgcatggggatttagtgatggcatgttaaaataccctaggaagtggttactgattaaatatcgctctccttcctacagtgtacacccccatccttctccatttgtctttttttttttttttttttggtagagacagggtctcactatgttgcccaagctggtctcaaactcctgggctcaaaggatcctcccacctcagcctcccaaagtgctgggcttacaggcgtgagccaccaaccccagcccacttgtaggtcctatgcacaacagccagagttctctctgtgtatgtcaccttgctctccacaaagaaggacagcagaagctggaagaaagtcctctgggcgcctgggctctggcgttgctctcttccacccatcgttcttatctcgcactcagggtagaaaagtctggtggaatggacacaaggaaagggctcagcacaggaggaaacaaggaggtgtaatcatgaccacagacggaggagatggcccaaggagatgataaaggaaaaggaggtgcagagctaaggaaagccccaaggagctgagagaggaaaagagacagcagagagacttccacggagatggggaggccttaagtagggcagcagcacatgtgggagagaaaccgagagggtggtgttaaagaaacgtaaaaggagccccactcacttccagtacagaaattcacccacagcagaggccaggcctcaattagaggcctacacaatggggtagacgctctcacagtccacgtccatcagcaccccttccatgttcctgcccacagaaaagcagaaagagtgtgtgaatagggacattgtcttctggcacaatcaaggctagaaagaaaaagaggcaaaagcaacaaggacataactcacaaaaaactcctaagtggagagtggaagacaagggagtatggggagttagagaagacagaaatattaccctctcaacatactgcaactcaggaatgacctcagtcaacctgcacagatggaagagtcagctgtgacaggtggagggagatgaccctggaagggcaaaggtctgagacactggcctcccctcttcccaggactcacttaaggataagtatcagtaatctgacggcctccactgccacactgtactctctgtccacgatcatggaaaccatccagtcctgcagaaaggagaaagtcactcaatatctcattacgcccattccaaatattctgttctcttagaatcagagcctcctaaagagagtgcctacgtagaggcagatgctgggatagccaagacatcttagagcatgaagggtagaaagatacaaggtggggaaacgggaaccacgacaaagagccaagccaaggagcaccacccgtctcaccttgaagcggccagtgaaggcgtgcggtcaggtcccggttaccgtacagccctttcagagccttcacgcacttcacgcggacttctcggtgctggtgaggagggaaaaccaagagaatggaaataagaccaaccacactctactcgcccctactgagcgtccagactcccctctccgatccctcattctagcttgggtgtcccctctactgaggactctgagatgtcagaaacaatgaacagctgtcttcatacttaaaaaaaaaaaaggatcacagcagtactcatgatgagaaggatcctttggctgccccttagcacctgcattaccatccatcaataactctcttccattggaaagtctctctccccgtacctcatgttttgagtcatttcatctcctgggtatgtctctctctaccttatcctaccctccccagtgctagcggagtttcaaggttcagcgccttgatgggttaatcattggtcactaggtaaaatatctcagtggcaggcccaggaaaaggtgaagtgtcctaggacaggaaaaagatgaaggaaacggaaagggaaactgactcgaatcccaccttatcatgcagagtccaaccaatatattttaaatagctgtcggtgaggaaagacgtgctgtagctttgcatccaacacccaatttcctcaatgcagatagcacggatctcaggaaggacatccctagacacagacagataagtcgactcttagagccaccctctctccaaactcactttccatcctaccagttaactccctctcatggaagaatttattttcttgaaatgccatgtaccccatgcctttcatttcttcctcccgatgtaaatactatatatatagtaaaatacatgtaaatattttttctcttttttttaagggatggggtctcttgctgtgttgcccaagctggccttgaactcctgggttcaagtcatcttcccactttggcctctcaagtagctaggactacaaaaatgtgccatacccagttagtaaatattttctttctgttaccaaaccataaaatagttaaacaccagccttgtacagcctaattctccactccacctgttgcccaggctggagtgcagcggcacaatctcagctcactgcaacctctacctctcgggttcaagtgattctcctgcctcagcctcctgagtagctgggattacaggtgcaccaccacgcccagctacctttttgtatttttagtagagatggggtttcaccatgttggccaggctggtctcgaactcctgacctcaagtgatctgcccgtcttggcctcccaaagtgctggagttacaggtgtgagccactgcacccggcctccatacctcttttaaaaaccaattttgaaagttcattcaggctgggcatggtggccaaaaattagccaagcatggtggcgggtgcctgtagtcccagctacttggcaggctgaggcaggagaatcgcctgaacccgggaggcggaggtgcagtgagccaagatcgcgtcactgcactccagcctggtgacagagcaagactccgtttcaaataaaaaactaacacactgtactactgcatgtaaggtggaaaagacaactggaattaaaatgtgctcaggtccttgtagaagataagaaatccagaggaaagcaagcaaagggggaaaaagaaacagaaaagataaaacgattgtgccaactcaatactaggccataaggctaagtctccataaatgtcttttttttttttttttttttttttgagacagagtatcactctgtcacccaggctggagtgccgtggcacaatctcagctcactgcaacctccacctcctgggttcaagcaattctcatgcctcagcctcccaagtggctgggattacagacaaatgccaccacatgcagctaatttttgtatttttagtagagatggggtttcgccatgttggccaggctggtctcgaactcctggcctcaagtgatctgcctgcctcagcctccccaagtgctgggatcacagatgtgagccactgtgcctagcccctacataaatttcaaacaccacattccctgactacaacacaataaagttagaaatcaaataacgaaaatataactagcaaaattctgtatgtttgaaaattttaaatattttcccagaaactataaaactacatgttaatgtggataaatctcaaacaatcttaactgaaataattaaatcacagaagcctgaataatggattcatttacataattaaagaacacattcatagtggtaacactataatgaaagatgagaaagattaacgcaaagttcaccctagtgtttacctatgggtaataaggggactgtgaggtagggtagaaagaaggtacacaaaggatctctacagcactattaatgtttcatttcttgagctggggctagagatctgggtgatatctcatttttattttttaaactacatatacgctttgtacacttccagatattagaacttcaataaaattataaaaaaagaaacagagagggaaaaaataattaagtataattgtcaagatggagctaaaaaataacatgggtgaacaaggtgccacccacatctaagcttccttcccatgtcatgcaatgcctctcctcatctgctccatcaatcaataaaggcataatcactcctgtgatacctttaagaaaagaacacgctttaagaaaagaaacgctctctcgaagccgggtgcggtggctcacacctgtaatcccagcactttgggaggccgaggcaggcggatcacctgaggtcaggagttggagaccagcctggccgacatggtgaaaccccatctctactaaaaatacaaaaattagctaggcatggtggcacatgcctgtaagcccagctacttgggaggcctcagcctcccaagaccatgagaatcgcttgaacccaggaggcagaggctgcagtgagctgagactgtgccactgcactccagcctgggcaactgtctcaaaaaaaaaaaaaaaaaaaaaaaagaacatgctctcttattcaaggttaccttctatcactccaaggattcaccccataatcttatctttcttgatatgttacactcactaaaatgttcacatcaaatcaagtttgtagacacttgtccttaccaccttacaaaaagtgagatggtatcaacagaggtaagacactgcttttacctgcatgtcacttttggcagctttcgcagcattgaaaatatcattggctggtggctctgactgtttccggctatgacgatgtaccgcttgggaccctttctttggatattttgccacctgatacacataaaaagatcagaaatatgaaaaaaaggtaacagtgacattaacacttggtttcatcattatcacacaagtaggcttatgctgccaattccacagcagtctgagttagactcagtcctgaaataattgatttttatattatgaagtttattaacttttttccctttaaaaaaaaaattccttgagtctccttcccgtatctctataaccaaacatccttttcttttcttttctcttcgaaatttctcttcttcctatttccgtcccttaatactttgtaaatcttgtccttttttgaaccatatcacctgaacctcttaggttttctcttttttttgagacggagtctcgctctgtcgcccaggctggcgtgcagtggcgtgatctcggctcactgccagctctgcccccagggttcgtgccattctcctgcctcagcctcccgaataactgggctgattcccccacaagattcaaaaacaaaagaaaactggctgactcaccggcgttgttttcagtggtcgttttgctgctttcttcttcacaccgcgattgaagctgtcctcaaatcattttcttgtcttcttgtctatttgtatgaattactgagttacattctcattgctacttatttaagcaaagtattcttagtttgttaagaacaaagaactacaaattgtgttcattttctgtcctttcctgttcttagactaaattacctgaaatacatcaaaatatatgctgtatgcttacctatatcaaaactatgttgtttaggtgccgggcacggtggctcacacctgtaatccagcactttgggagttcaaggcgggcggatcgcctgaggtcaggagttcaagaccagcctggtcaacatggcaaaaccccgtctctactaaaaatacaaaaattagccaggtgcagtggacagtgcctgtaatctcagctactcatgaggctgaggcctgagaattgcttgaacccaggaggccaaggtggcagtgagctgagatcatgccactgcactccagcctgggtgacagagtgaaactccgtctgaaaaaaacaaaaaaaacaaacaaacaaaaaacctgaccatattgtttagggatacttagctgacaaaataatagagacaagcatgacataattaccacaaaaatcaggccctggggtgctggtggggaaggtttaagtggaaagaatggagcggtgacaatgtgtgtcaacctaggaggtggtgaccctggggttcgctttgtaattcctcaaaatgagcatttatgtgctattcacttttcagaggatagaattctgaactaaaatgtttaagcagccatacgcaaaaaaaaaaaaaaatatggatagatttttattttaattaaaacatttaaaaaatagagacaaggcagctgggcgtggtggctcacgcctgtaatcccagcaatttgggaggccgaggcaggcgaatcacgaggtcaagagatcgagaccatcctggctaacacggtgaaaccatgtctctactaaaaatacaaaataaagttagccaggcgtggtggcgggcgcctgtagtcccagctactggggaggctgaggcaggagaatggcgtgaacccgggaggtggagcttgcagtgagccgagatcaggccactgcattccagcctgggcgacagagcaagactccaactcaaaaaaaaaaaaaaaacatagagacaagggtcttgctatgttgctcagggtggtctcaaactctccgggctcaagcaatcctcccgcttcggtctcccaagcaatcctcccgcttcggtctcccaaagcgctgagattccaggcgtgaaccaccgcgctcgaccaggaaaaaaaatatatatatatataatatataatatattttataatatattatgtcatatattacacataatatacaatatgtataatacgcataataaaggtatatttaatatatataaagatatatatgtatataataatttttttttttgagacggagtttcactcttgctgcccaggctcgagtgcaatggctcgatctcagctcactgcaagctccgcctccagggttcaaaccattctcctgcctcagcctcccgagtagctgcgattacaggcgcccgacacacgcccggctaatttttgcatttttagtagacacggggtttcaccatgttggccagactggtctcgaactcctgatctcaggtgatccgcccgcctcggcctcccaaagtgccgggattacaggcgtgagccacggcgcccggcctgaataaatcttttaaaacataaaaatctgggtgagcccctggccggccggcacagatgccggggtggggccgcgaatcggttgggacgcactctatccggcctaggggcacccgggccagcacccggccgccgcgcgtgcgcagtgggcggggggccccgcgctcctacctgcaagtggccagtgccaagtgctgggccgccgctcctgccgtgcatgttggggagccagtacatgcaggtgggctccacacggagaggggcgcagaccccgtgatagggctttacctggtacatcggcatggcgcaaccaaagcaagagagggtggcgcgtgccagacaccaacggtcggaaaccgccagacaccaacggtcagaaaccgccagacaccaacgctcggaaaccgccagacaccaacgctcggaatacacgccagaccacgacggagggcgaccacctcccttctgaccctgctgcgggcgttcggaaaaaaaaacgcagtcc

SEQ ID NO: 1724 - DNA, 937 bp, Homo sapiens
cacttgtaatcccagcacttttggaagccgatgccgacagataaccagaggtgaggaggttgagatcagcctggccaacatggtgaaacctgtctgtttttctgtaaaaatacagaaacaatgagctgggcgtgggagtgcacttctgtaatcccagctacttgtggggctgaggcaggagaatcacttgaaccgggaaggtggaggttccagtgagccgagatcacgacactacactccagcctgggcgacagagtgagactccgactcaaaaaaaaaaaaaaaaaagtgccagacagccctggtttggtctgatatgttcagaaaaaagcaaaacagtcacctctcaccttttcttttcctgcaatgatgccgtttaatacaacaatggctgtaggtctgcggcagaaatatcattcaagtgaaacagaagggctttcctggctggacacagtggtcactcctgcaatcccaacactttggttggctaaggtgggaggatttcttgcggccaggagttcgaggctgcagtgagctgtgatccaccactgcattccaggctgggcatcagagtgagacctgtctctaaaaaaacccttcactccccaaataaagggattttcaaataccagcctttcagcatgaggatcacatggaggaacattaagacacagatgctgggacccagccctattgattgtaattaaaaaactgaggtgaggcctgatttagctccatcattggaatccattcagatttgaaattctctgagttggacagtgcaagagagatcctaaagaaagcaaagtcactgtggactgaaatgagctgacaaggttttctgagcgtggtgaaatatgatctgggcctcgtttgggagggctgtggccaggccttgagtccgtggctcagtgggaccttctgaaacagcctccaa

SEQ ID NO: 1725 - DNA, 300 bp, Homo sapiens
gacagagtttcgctcttgtcacccaggctgcagtgcagtggctccatctcggctcactgcaacctctgcctcccaggttcaagtgattctcctgcctcagcctcccgagtagctgagattacaggcacccaccaccactcccggctaatttttgtattttagggtttcgtcatgtttgccaggctgatcttgaacacctgacttcaaatgatccacctgcctctgcctgtcaaagtgctgggaatacaggcataagacactgcacctggcctgtttttgttttttagagacaaggtctct

SEQ ID NO: 1726 - DNA, 319 bp, Homo sapiens
agattcatccaaacactccctcttccttttgcagccaagggacctacgtggggggctgggatctaccccaggggctgagtaaagaaaccaggccaccgtgtaatgcttctgcaactgatcacgttagaccccgaccccaaaccccaaaccactctccatcctccccagcctctcagactgctggcttctccaagccacctttctgactttctcctctgctcaaccccatgtgccactccttcccctccccattcttccctctctctgtcctcagaacactgcgtcatatcgttccctggtccctggctctctgaggccc

SEQ ID NO: 1727 - DNA, 255 bp, Homo sapiens
ctcacgcctgtaatcccagcactttgggaggctgaggcgggcggatcacgaagtcaggagatcgagaccatcctggctaaaacggtggaaccctgtctctactaaaaatacaaaaaattagctgggcatggtggtgggcgcctgtagtcccagccactcaggaggctgaggcaggagaatggtgtgaacccgggaggcagagcttgcagtgagctaagatcgtgccactgcactccagcctgggcgacagggcga

SEQ ID NO: 1728 - DNA, 3038 bp, Homo sapiens
tcaggcgggagccacagcgcctggcccaaaaccaagctttcttatcccaagcaccgacctttatcaagtctacctaatcctctgttgtctccttaagtgtccctcatgagtgatcacttcagagtcctcccgcatggagagctcacccactggggcatatttttcccattggaaaagtgtggttattggaagtttcctctttagaaagaacaggattggaggtgctctctggggtgtcctcctaccaagcagcctgttgaaggcctcgtagtactcagggagcacgagcgacactcgccgtcgcttcgccttcatcttgaggccacacagcgtctccgccacccaggtctcctcaggctcaggggcgagctccttctctggctcatcatcagattcatccaaacattccctcttccttttccagccaagggacctacgtggggggctgggatctaccccaggggctgagtaaagaaaccaggccaccgtgtaatgcttctgcaactgatcacgttagaccccgaccccaaaccccaaaccactctccatcctccccagcctcgcagactgctggcttctccaagccacctttctgactttctcctctgctcaaccccatgtgccactccttcccctccccattcttccctctctctgtcctcagaacactgcctcatatccttccctggtccctggctctctgagtccctcttttttttttttttttttgtttcgagacagaatcttgctttgtcacccaggctggagtgtagtggtgcaatctcagctcactgcaacatgcatctcccggattccagttattctcctgcctcagcctctcaggtagctgggattacaggtgcctgccataatgcccagctccattttgtacttttaatagagacagggtttcaccatgttggccaggctggtctcaaactcctggcctcaagtgatccgcctgccttggcttcccaaagtgctgggattacaagtgtgagccactgcacccagcctgaatttctccattcttcccacacaccctccccaggttctccttcctgacctctgacccttcttttttttcttcttttttttttttttttttttttttttttttttttttgagatagcatctcactctgtcacccagactggagtgcagtagcacgatctcggctcactgcaacctcttcctcccaggctcaagtgattctcctgtcttagcctcccaagtagctgggattataggcacacaccactaccgcctggctaatttttgtacttttagtagagatggggtttcaccatgttggccaggctggtcttgaactcctgacctcaggtgatctgcccgcctcagcctcccaaagtgttggggttacaggggtgagccaccacgcctggcccccttccttcatcttagtcaatcctatgccacctcttcttcctccagtcccctcacctgatggtcccgacacttcatcatccaccacctcctggagggggtaccctgaggtgctctgctgggggctccgctcttcctggggctgcggttgatggctcatcatgatctttcccaaaatctgtcccatctcaccaaacctagtctctgttctgtccttggtcttcttctggacactgctgggatccagaagagtgtgttatcaattctcgaggctgggagaagtcaggagtggagaacagctctgagaagttactgttgtccaactgaactcccaggtgccgacagagtccggtccctccaatcaggaaggtcggaatctctgatgtcatcgctcatgccaacctggcaaccagtttgaaaaaaaacacatgtaactgccaggctgatctcttgtcctggagatcctgggtgaatggtatctcctgccactgtcccaacctcagaccactgtccaaaagcatcttcagggtctccgcatccctctgttccctgtcccagcagaggctgtgtcctctccactcaaagcttgaagcgtgttggggtctcctcttctctgtacatgcccgtttcagagtccagtctggtgggagagggatcaggatgggaaagaaaagtagggtaagcagaaacgatgaaaccttacaagagtgagattatcatgtacaagagatcccaggaacattgacttgatgaaaaagtcacatcagagcactcaatttggcagaggttttctgccgagtgtctactgacattcactgtccgagattctgtactgggggtacacgcgtcctctgccctaaggcatctttgagtccaagagatattttgaggactggaaatcataggaaactgcccatgagttcacacatatttccaatggtgtccccaatttcagggagtccacggatcacctaaagccagcccctccagtttggctaagaaactctatatatcaagttttgtatcatatgtattgctcttaactcagaaaattccaccatttatagcagtggtttatttatttataccattgaaggaaatggtttatttatgaatctatattatggatattctataagatactgggtgtacaaaaagactaagtcgaaaaatctcagctgtgcacagtggctcatgcttgtaatcccatctctttgggtggccaagggaggaagactgcctgaggccagcagttcaagaccagtataggcaacatagcaagagcccatctctaaaacaaaacaaaacaaaacaaaacaaaattagccaggtgtcgtggctggcacctgtgttccaacaacttgagagactgaggtggcaggaggattgcttgagcctaggagttaggggctgcagtgagctgtgatcgtgacaccgcactccagtctgggcaacacagcaagaccttgtgtcaaaaaaatttttttaattaaatataaaagagtttcatgacattcagagaccatccaaagaacctgtgggttccggccaggcacagtggctcacgcctgtaatcccagcgctttgggaggccatagcaggtggatcgcttgaggtcaggagtttaaga

SEQ ID NO: 1729 - DNA, 257 bp, Homo sapiens
gttattctcctgcctcagcctctcaggtagctgggattacaggtgcctgccataatgcccagctcaattttgtacttttagtagagacgggggtttcaccatgttggccaggctggtctcaaactcctggcctcacgtgatccgcctgccttggcttcccaaagtgctgggattacaggtgtgagccactgcacccagcctgaatttctccattcttcccacacaccctccccaggttctccttcctgacctctgac

SEQ ID NO: 1730 - DNA, 300 bp, Homo sapiens; identical to SEQ ID NO: 1725

SEQ ID NO: 1731 - DNA, 614 bp, Homo sapiens
tcaagaccagcctgggcagcctagcaagatcccatcccttaaaaaaaagtttttaggctgggcatggtcactcatgcctgtaatcctagcactttgggaggccaaggcaggcgggttgcctgagctgaggagtttgagaccagcctgggcaacatggtgaaatcctgtctctactaaaatacaaaaaattagccaggtgtggtgttgggcacctataatcccaggtactcaggaggctgaggcaggagaattgcttgaacccaggaggcagaggttgcagtgagccgagagcgcgccactccactccagcctggacaacagagcgagactccgtctcaaaaaaaaaatgtttttaattagccagctgtgatgatgcatgcccatgtcccagctacttgggaggctgaagcaggaggattgcttgagcctgggaggtcaaggctgcagtgagctatgattgcgcccctgcactccagcctgggcagcggagggagaccctgtctgaaaataaaaaaagaggtgggggcctatgaccccccctttaattttggcccaaccttagtaacaggatagtcattgagtagggcaaaagtgatgttatgatgtttttcagc

SEQ ID NO: 1732 - DNA, 300 bp, Homo sapiens
gacagagtttcgctcttgtcacccaggctgcagtgcagtggctccatctcggctcactgcaacctctgcctcccaggttcaagcgattctcctgcctcagcctcccgagtagctgagattacaggcacccaccaccactcccggctaatttttgtattttagggtttcgtcatgtttgccaggctggtcttgaacacctgacttcaaatgatccacccgcctctgcctctcaaagtgctgggaatacaggcataagacactgcacccggcctgtttttgttttttagagacaaggtctct

SEQ ID NO: 1733 - DNA, 10119 bp, Homo sapiens
gggcctccagggaaccctgatcctgccattcacttcaggtcgggggaacagagtgaagcccctgcctcaaaaataatcataaaaattgaggtcggggaaggttcataaagattgatgcacctggagttaccaatttgggtcaagggtccaatgaagctttggtttacatcttgtgcagctaaccatttgagcccagagcctgagacttcgtcataaggagggaggattatggattaggcttctggactcgtggttcgtgatgttgtcacgttagaaacagatctagcgcggttacaagtttagatctgaagtgacacaaaaggccccagctgtgatgaagtccaaagccacattctctgagggtgccctactccctgggaagacccacccaaagtcctggctatgaagcagatcactggggctgaccttgggtgtattaagttttggagtcagggtcaccaaagtgtgagtttcacagttgaacacgatggttcagaagcagggtatagaatgaaaggcaggagataaaattgcacttctcaattgctctgaactctagctagacttgacatgggacgtgaataaccttcctgtctagagagctgcctccttgaagtgtgacattgtctctctcacttccagaacaccggacccaggggagatgtggattttcagcaggaactttattccaatgctaatggcagacatcaggaaggaggagaggaaccatttgtgcagatcatctagaagaacctggaccattcttgacagagctgaatacagtgatcacgttgtcctccaaggagcaggggtggggtggggtacttctaggagtccttggagaaaagtaagaaaccaggagtgtttccagttccaccctttcctgcggcaccacctccctttttatattgctgaatgccaacctccctggggcggaacctggaggtcctgtttcttatggacttggttgccacagtccaggagcatttgaaggcacagtgcaggggctcagattggcacagaattctttgtgaaatatgagtgccacagactgtaacagatagcttcatgcacactatgcattttattggtttgtttggaaaatgttggccattgaattattaataggtttatttcaaatagtttggaaattgttgtacttttgaaaacatgctgttcctgtagagttttttgatgagagttatagttgttatatatacctaaagataattttcttttcatttttaagtgagaattctttttatcctaaatcttttattatctttaaatttttttctgtattattatatgtgctcctgaagcgagcactctttttatctatgatacttccataataatctcttctatttatagctattggtagttccccaccagaaaaaaacataattctggtgatagaaatttttatttgctgtttaggtttgtgactgacttgtgagaattcagttgtgatttttaacatgtctcagatatatatactaacacgtctaatatatactatctattttattggtttattttgaaaaacatgggtatagaattatttaaatattattttatttactgaaatatttattaaatatatttatttatttaaatattattattactttaaatattattttaaatattttggaaatactggtatttttgaatagatgctgtttctataaagctgtgtgatgggtattataactgttgtatacacatacatataattttgttttcctttttaagagaggattcttttcatcctaaatcttttacctttcaatctttgtatctattattacacgtgctgctgaagggagcatggtttttatctatgatacttagttaacatatatattacatttatagctatgtggtagttcccctaaattcttgtaaaaataaatttttatttgatatttagtgtatgtttgaaatgtgagaattcagatggaattttttatcttgttttggcatgtttgtatgttactttaaagaggatgtgtgttctaaaggaggacatgagctgtgtgttttcaagagaacagtgcagtgcatctcttggggaaacataataaagatgaacttttctcaccttcacagtgagtgtgatcatattgtggtctggattgattatttgctgtcaagtgacatttttccttaatggggttgtggttatttgaacatatttgttagctttggaagataatcctgtgctgttttttatgtagaaaaaaacatacggctgggtgcagtgctcacacctacaatcccagcagttttggaggtcatggcgggaggatcacttgaagcctatttttaatttttattttttaaagaaaaacaacagaagagaaggctgatcccaagctacagggtttttttgtttgtttgtttgtttgtttgttttggagacagtctcgctctgtctcccaggctggagtgcagtggcacaacctcggctccctgcaactttcacctccgcgttcaagcaaattctcctgcctcagcctcccaagtagctgggactacaggcatccgcctgtacgtctgactaacttttgtaaaaatagtagagacaaggtttcaccatgttggccaggctggtctcaaactcctgacctcaagtgatccacccgcctcagtctcccaaagtgctgggattataggcatgagctactgtgcccagaccccaagctagagttttaaagcaggaaatgagagaaagatattgagagaggaaaaccaggtggtaagaaaactctaaaggtggctgggcatggtggctcacgcctgtgatcccagcaggagttcgagaccaggcaggagaatcactagcagagaatatgtctccccaacccctctcaaaaaaaaaaaaaaaagtccaggcgcggtggctcaggactgtaatcccagcactttgggaggctgaggcgggtggatcatgaggtcaggagatcaagaccatcctggctaatacggtgaaaccccatctctgctaaaaatacaaaaaattagctgggcgcggtggcaggcgcctgtagtcccagctactccggaggctgaggcaggagaatggtgtgaacccaggaggcggagcctgcagtgagcagagatcgcgccactgcactccagcctgggtgaaagcgcgagactccatcacaaaagaaaaaaaaaaaaagaaagttcctgcaacagttcaagctgtgaaagacaggcactctgccatgcaattctttgtgatttttcttttttatttttggagtcggggtcttgtgctgtcacccagactggggtgcagtggtgcggtcatagctcactgtgggctcagactcaagctcaagcaatcttcttatcttgcctttctaattgctgggattataagcatgagccactgcacctggcctgtgtgacgtaattctgatgtcaactccctgatgttacatcaaatgccacaggttaaggccaccagcccccgctaggctgccctcgcttcagatgcagctgcaagcttgggtgtccacagaccgcatgtacttctcaccaactggctgcaaatttggaggttcccaccacgtcctcaggtttgataattcaccataacaacccacagaactctgaaaagcatgatactttctctttctttatttgagacagagtcttgctctgtcacccaggctggagtgcagtggccaccatgcttggctaattttagtatttgtattagagacagggtttcgccatgttggccaggctggtcttgaactcctgacctcaggtgatccacccaccttggcctcccaaagtgctgggattacaggcatagccactgtgcctggctgacttctagagtttcaataacagagatgtggttcaagaagaaaagggagacatgttttgtagacagcaggagcttcatgaaaagaagccaatgaagggcaggatgtgtagctgtctacctacaggaaaccagccaggagcctccccacagggacttcagcacagatggccgggaaaatctgcattcacctgagctctggacctaagagaggacaaggccttgactgtttctacagactcacaagatgcaatctctgcggtccatgcccgtggtgtgatctgggaaacagggggccttctaaatgccaacaacaaggaaatcaaatgtgcaacagacagaaatatcggcattgacacgggccatggagaggcctaaacagatgactgcagtccactgccaaggtcatcaaaggggtgactctgaaataagaaatttcagacgccacggcccaaatagctgcacgaggtggggaagtcctccacatgcctctgcttccttcagtacctcttcatgaaataagccgaggtacttccctggggaatttcctttctctttctttctttcgagacggagtcttgctctgtcgcccaggctagagtgcagtggcgcgatctcggctcactgcaacctctccctcccgggttttggcaattcttctgtctcagacttctgagtagctgagattacaggtgtgtgccaccatgcccagctaatatttgtattttcactcgagacagggtttcaccatctaggccaggctggtcttgaactcctgacctcatgatccacccatcttggcctcccaaagtcctgggattacaggcacgagccaccacacccagacttctttttttattttttgagatgaagtttcgctcttgttgcccaggctggagtgcaatggcgagatctcagctcactgccacctcctcctcctcccaggttcaagtgattatcctgcctcagcctcccgagtagctgggattacaggcacccaacaccaaaccccgctgactttttgtatttttagtagagatggaatgtcaccatgttggccaggatggtcttgaacccctgacctctaatgatctacccgaattggtctcccaaaatgctgggattacaggcgtgagccactgtgcccagcccctcccatacctcttttggccaaggcagtacaattcagagaatcttgccagggaagactggtaaatggacatcaacatgatgcctatggctcctggtggatttagatacctcctggtgcttactgatacctttaccagttacatgggggcttttccatgccagactgaaaatgctggagatcactgatcaaccttcaactatttactagcagaacactgaggggactctgcagtcaccaatatctcctattgcacttggataaacacctcccgggaaatagagatgaatagaaaggaaatacttaaacaagcagaatggctacattccttcaaccagaagggtccattagtctgttttcacactgctataaagaactactggaaactggggaatttatgaagaaaagaggtttaattgactcacagttttgcaggctgtacaggaagcatggctggggagccctcaagaaactgacaatcacggcagaaggcgaaggggaagcaggcacgtttctggccatggtggagcaggagagacagagagagtgaagcaggaggtgctgcatgcttctaaacaaccagatcccatgagcgctcactcactatcacgagaccagcaagggggacgtcagccgccatgagccaatcatctcccaccaggtccctccctcaacactgggaattgcaattggacatgagatttggttggggatacagagctgaaccatatcaagggtagttcaaccactgagattgattgattgactgagatggggtcctgctctgttacctaggctggagtgcagtggcacaatctcggctcactgcaacctccgcctcccaggttcaagcaattctcctgcctcagcctccctagtagctgggactacagcacacgccaccacacctggctaatttttgtattttcagtagagacggggtttcaccatgtttgcccggctggtcttgaactcctgacctcgtgatcaccctgcctcggctcttcttttgctggaattacaggcgtgagccaccgcacccggacaaccactgagatttagaaggcagtcgagtccactataccacacctcacctggtttcttcctctgttggggcccctcgtggccactgttctgttactttttggtcctatttatttaaatggatggtgagctgtttgtcctccaggatccaacacttccaccttcagcttgtattacaacaataccagcctttcaagctactccgggtgaccccagaactcatctgaactcagaagcccaagagtttcattcctctcactttaggggactaagtgcccctggtcagcatgaagtcgatacagaagcatgacctccatccctaatccctcaagaatgaggagtggaaggtgttggcaggagggtgggacgcggtttgtaaatctgtaactgcatcagaccaaatctagttcaactttttttttttttgatggagtttcactcttgtcacccaggctggagtgcaatggcacgatctcagctcactgcaacctccacgtcctaggttcaagcattctgctgcctcagcctctggggtagctgggattacaagggtgcgccaccacgcctggctaatatttatatttttagtagagacggggtttcaccattttggccaggctggtcttgaactcctcgacctcaggtgatccacctgccttggcctcccaaagtgctgggattacaggcgtgagtcaccgcacccgaatcagttcaacttttatgtaatgaagttgtcagttgttttccaattgccatcgacctgcaggttgaaggtcatgtaccctgtgcatgcccaggttaaccacgcgtgccaccgtggagtggaacctaagagctcagcctgaagagcccggaccgatttaagaaccagacacccccaggcaggagccaggatccaatcagattgagttttggtgtcaccccatggcaggatccagtcagatcacacctcccagcattactttattgcaagatccaatcaaatcacacctcattaccctatgcttataaaacctgacacagcccccagctgtgtaagggagatttgagtacttcctcctgtgttcttgctggctgacttacaaaaaagctttaaaaaaaaaagccaggcgtggtggctcacgcctgtaatcccagcactttgggaggctgaggtgggcagatcacttgaggtcaggggtgcaagaccagcctggccaacatggtgaaaccccatctctactaaaaatacaaaaattagctgggtgtggtgacacacacctataatcccagctacttgggaggctgaggtaggagaatcacttgaacccaggaggcggaggttgcagtgagccaagatcacaccactgcactccagcctgggcgacagagtgagaagactccgtctaaaaaaaaaagttaaaattagcaccaaacgctttacaagtaaaaaaagtttttagctgcatatgtttaagtaactttttagattataagaaatacgcatgcaaaatggaaaggcacaaagaagagagcaaaaagtgcatgagatctcacatccaaggataaccgctgagaacatggaagtgctgactcttcagtctttatactatacacatttaggcctgttttgtttttataaaactgtaatcatataatacagacagttttataatctgctttttaaacacaacaattatataacatttagctgtttcatttgcattcaaattcataagggttccagtaactcatttatcagaaaaccaagagaaatattctcataaaaatataagtacataaggtcaggcatggtggctcacgcctgtaatcccagcactttgagaggccgaggtgggcggatcacctgagggcaggaattcaagaccagcctggccagcctggacaacatggtggaaccccgtctccactgaaaatacaaaaattagccgggcgtggtggcgcgcgcctgtaatggtagctactcagaaggctgaagcaggagaatcgcttgaacttggcaggtggaggttgcagtgaactgagatcgcgccactgcactgcagccagggcgccaaagtgagactccatctcaaaaaaagataaaaataaaaaataaaaaaaatgtatatatatgtatatatatttttccagacagggtcttactctgtctcacagtctgaagtgtagtgacgcaatcatagctcactgcagtctcaagttcctgggctcaggtgatcctcccacttcagcctcccaagtagctggaactacaggtgcatgccaccatgcccagtcaattttttttttaatttttcatagagacagagtctcactatgtttcccagtcctaataaacattatgtgataaaaagaaaaaagtaaatcatcctgaagttaagtctttaatgagaaatgcaaataaagcatttctcaataaattatgggaagagaatcaactgaagaataaacatctttagtaaatcttttgctcatgtgcattaaccaatactcttgaaaaccaggattaatttactgtaccttcttaatattcctttgaaattccttatggcgcacaggtagcgtagaaaataactgcttcacgctgactgtggtccctctggggtgggggtagggggttttctggatgattttcccatcgtgatcaaaaacaccagttgagtcccaaccttcgccgatacgtggcaggtagaaatggtgacatcactgtgagagaataccaggcatggtgtgttcagtgagagatccatgatgttgggcactgactactcttttcttcacttgcttttctctcaaaattttcttaaaaagctgatgatccctctgagataaccgagatctaaacggttgaggagtcatcacaaaatctaaggtctggcatctaaaagacagtgagacagagagcactaaacatgctttgttttgataaaagctttgacttcatttttcaggttgaattgcaaaaccataaatgatctcaagatttattgattctcaaatagagatttgttttgttattactcttcaaacaaaattttttaaaagaatttttttaaagaattttttaaaatttttaaaattttttttaaagaatccaaaagatattataattaaaatgtatatgtagggcagggtacggtggctcgtgcctgtaattccagcactttgggaggccaaggagggcagatcacttgaggcctggagttccagaccagcctgggcaacatggcaaaaccccatctctactaaaaatataaaaattagccaggagtggtggtgcacgctatagtcccagctcttcaggaggctgagtcacgaaagtcacttgaacctgggaggcagagactgcagtgagctgagactgtgccactgcactccagcctgggtgacagagtgcgactctgtctaaaaaaaaaaaaaaaaaaaatatatatatatatatatgtatatatatgtatatatatatgtatatatatgtatatatgtatatatgtatatatgtatatatatgtatatatttatgtatatatgtatatatatgtatatatatatgtatatatgtatatatatgtatatatatgtatatatatgtgtgtgtgcatgtaattatttataaaatttagtatctgtgctgtaattaaatagtgctttggtgaaatgtttccctaaaaattgataatgaaaaccaatggtaactatcatttattatctatatgttatgttcaaattgagaagttactgttttaataagggtaaccaattttttaaacaatactatttgcttcatttcattcatttattgctcacatttcagaagtactaggacttagattgcgcagtgagacaaaacagaattcagaagctagaagctgagatattgagatagaaaattgtaaataataatgattccaattaattttcagagaggtttttctaaggggtcaagtgaatggataaaaatattttctcacctcagtgcacaaagtgagctcagagctttcccccgaaagccaaaagtttcaacccgagttaggtcggcaaactcttgaatcttagatgtgtgatgtttcagagc

SEQ ID NO: 1734 - DNA, 256 bp, Homo sapiens
gttattctcctgcctcagcctctcaggtagctgggattacaggtgcctgccataatgcccagctccattttgtacttttaatagagacagggtttcaccatgttggccaggctggtctcaaactcctggcctcaagtgatccgcctgccttggcttcccaaagtgctgggattacaagtgtgagccactgcacccagcctgaatttctccattcttcccacacaccctccccaggttctccttcctgacctctgac
